United States Patent Application Publication US 2025/0327096 A1 - sequence listing, part 2

SEQ ID NO: 1 - DNA, 3646986 bp, unidentified (residues 1,823,494-3,646,986 of 3,646,986)
  source 1..3646986: mol_type = genomic DNA
tcaaaccgcgctgagcagattttagctaactttgatttatacattccaatgtttaaattagttaagccaaaatctagtgatgtaaaaagtttactcggacaccgagcgcgcagcagcgcagagcttcgtgttcaggctcagtaagggggtagtatgagcgaaaatgtataccagtttatcgatgtacaacgtgttgatccgcgtaaaaagccaatttcagcgcgtaagcaatctttcgtcgaaatttacgagccgttttctgagacacaagtaaactcacaagcggaccgctgtttggattgtggtaacccgtattgcgaatggaaatgtccggtacataactatattccacaatggttaaagctcattcgtacgggccgtattttagaagcggcagagctttctcaccgtactaacagcttaccagaggtgtgtggacgagtttgtccacaagaccgtttgtgtgaaggctcatgtacacttgaagaggaattcggtgctgttactatcggtaatatcgaaaagtacatcacagatacagcctttaagatgggctggaaaccagatatgtcgtatgtggtttggtctgacaaaaaagtagcaattattggtgctggtccggcaggtctgggctgtgcggatattttagtacgtaacggtgtaaaacctgtggtgtttgaccgtcatccagaaattggcggacttcttacgtttggtattccttcattcaagcttgaaaaagaagtgatgcaaaagcgtcgtgaaattttcactgaaatgggtgtcgagtttaagttaaacactgaggttggcgtagatgttacccttgatgaaatactcgctgaatatgatgccgtgttcttaggtgttggtacgtatcaaagtatgcgtgcaggacttgagaatgaagacgcagatggtgtgtttgatgcactaccattcttaattggtaacaccaaccgtgttatgggctatgccgaagacaagcaagcttatatcgatatggctaacgaaaaagtcgtcgtgttaggcggtggtgatacagcaatggactgtgtaagaacctctattcgccaaggtgctacaaaagtaacttgtgcttatcgtcgtgacgaagaaaacatgccaggctcaaaacgtgaagttaaaaatgcccgtgaagagggtgttgaatttacctttaacgttcaacctaaaggtattgtggttgacgaacaaggcaaagttgcaggcgtaaaaatggttaaaactcagttgggtgaaccagatgagaatggccgtcgtcgtgccgaagaagtggccggttctgaacatgttattgaagcaactaaagtgctaatggcatttggttttaaacctcataaaatggattggttggagccgtatggcgttgaaattaaccattggggtggcattaatgctcctgagcaaggagaatttactcaccaaacaacgaaccctaaaatctttgcgggtggtgatatagttcgcggttcagatttagttgttacagctattttcgaaggccgaaatgcagctgaaggtataatggaatatcttggcgtataactacttaacttaatgtacgattttgaaagcaagccgatggcttgctttttttatgcttaatcaaagcaaaatcatcgcctcaactaatatttgttgagagtaatccccgataaagaaaatgaaaaatcagaaccagcaacgtataattagtcagtaaaaatggttggattctaatttatcttcgcagtttagtgctagctccatatttgctccacattgttacgctttaatgttccaaagaagtttggatccagtatggacatttgatgctaacaacatggaaaaaaagaaaatgttttgcgaacacattaatcatgagcaactaaactgttttcaaccaagttcaaaatctgaaaatgatttacttaatgaggttatgaaaagtgaagacctgcacgatattctgactatggttttattagacgaaaccttatcagacgcgtttaaagcgatggttaggaagcaattaaaaataataaaaaatatgaaacggaaataaaaatgtcgcagatattagtcgttgaagacgacttagatattgcagaacaagtgctgttgttcttcaatgcatctggctttactactcatcacattactgatggcagcgccgtggtgtcgtgggtcaaagagaataatccagatgcaataattctagatgttatgttacctaatttagatggcgtggagtgcatgaagcagatccgcgctttttctatggtacccattattatggtaaccgctaaagttgaagaggctgataggttaaaagggttagagcatggtgctgatgattatgtgtgtaaaccttttagtggcgcagagcttgtcatgcgtgttaaggctattttaagacgatgtacaccaatatcccagcagccaactgagatgcctgctactatttgtctaaacgaagatgccttagaagttgaaattcaaggtgtatcgctcggtttaactaaggtcgaatttgacgtgtttaagcttttatataaagcaccaaaacgtgttttctcaaggcagcagatacttgatcatattcaacctaataactttgacattaccgatcgtgttatcgatagccatatcaaaaacatccgcaaaaaactaaagaatttacagttctctcctaagatagtcgcttctgtttacggtgcaggctatcgttatgatgaacgtcaaatcaattgatttggcgttcatcgctttcacaccttattgcaaacggttcgttcaccttttctaacagaatggctaaatacgtacactgataactctctggattgaatatcctgccaaatttgtttactaggaagtggacataatgcgtaatgtaaatattggcttaacgcctcaccttcaagagcaattggagttggcgtttgtacatacacttgaattgcattagttgaatatttaatcttgtttaaacgccaatgacctaataaaaactgttttgcaaaaaactgtgatatacgctgttttgcagattcagacagtggaggggacgctactggcttttcatagcttatataataaagcccagcacttaatagcaagctagcgatagcagcactgaaaggaagatgagactttttggtttttttaactttgttttgacgatgtttacgctcaacagacttagcccattgagcatgttttaatgactctgacatggttccattccacagtagtttatagtgctatttaagcaataaaatgtggtgaaaaaatggagacgaaagcgcttatttattacttaaaggcagtaaaatcctgatacataaaccacctgacttacccggtactgcgctaatattaccagacattagttctacaaaactttggcagatcgaaagccctaaacctgaacctcctaatgcacggctacgagactcttcaacacgatataaacggtcgaatagtttgcctatatgcgcttttcctaccccaggagaggtatcatcaacttgaataaacaactcttggttgtttgctcttactttaaggcgaacatggccagggctgtctgtgtataggcaggcattagtaaaaatattgttgagaatttggtcaagcttttgcttatcaaccgtgatttcaactccttcagcaataacaatgtcagctaaaaatgtgagttgatggctgcaaacatagcggcgcatgtcttgctcgtattcagtaaaaatatgtgctgcattatattgttgaagatttaatgtaagggttttgttttcagcttgagataactgatatacatcggatatcaagttattcagctgtgctatcttgccattaattttgctgtaggctaggtcacggttttcttgaatatcgagttccagcgcttcgatatgcagttttaatacactcagtggtgtgcgtaattcatgggatatatctgcaagcattttgtctttctcaatcaagctatattgatacagctttgctttaaatagtgcttttcgatgcttaaagtaatacagcactaaggcaagcgtactgaataataaaacaatgccggctgataacagccatatctgtttttctaatcgctgattattcatttgagctgtagcgagtttgtttttttgtatctcatcatcaatgcgctgctgttgctcgattgctgttaattgttttttgttcttttcaacagcttgatttaaatgctcttgaaacaacgactcggcaagtgtgtttttaagttttagctgttcagctgctagcttgtaatcaccgataagttcagcataaattgcggtataaccgtgctgtttttgattcaataagcggttatcaatatcagcgagtagttcttttgtgttgcttaaataaagattaatcaatatagggttttttagtgctagatgtagttcgattaaattaaagtaagagtaaattttgcttaatgtcgagccagacttaagcgcagcatttaaccctgattcagcactactgagcgccatatgttggttgtctatttttaaatacaattgcattagcgtatgtttcgcggtagccatattctcataggcgttgacgtcggctaaacgggtataggcgttatttaataaggggagcgcctgctctaagtcacctcgtttatacactaacttggcaagttgtaagctggtgtctgcaatattcatttggtttttggttttaatatcaaactcaagcgcttttttatagaagtactcagattgagaaaggtcatcaagtctttgagcaaggtttgctaagttataaaagttagtggcaaccagttcataattatcgctgttttctaacaagccttgtgcttttacttgatggtgcattgattgttcaagatcattaagtgtgtcgtatagcgaacctaaattgctatggctttgtgcttgtaggtttttgtcttcaagttcgtttgcaagcgctaaggctgccatgtagtgcttctttgcttgaattgtttttacttggcggcggtagttgatccccaactctttttggatctggtattgatcctctttactcaaattagcaattttttgtaatggcagtaacagttcaatcgcctcgttgtaatgaccttttttacgtaaaagtggcgcttgagccatggcaacatcataggttgatgaagtgctattatgatctttgtattgctcaagaattgtgagggcttcactgatttttccttggttttcaaggtcagtgacttgatttaatagagaacttggcagtgtggttgctacacttgcgcatgacaaaaaataaatagcgataagtaaatagtatttcattagaggttagaatgggcttaatgtgtacgcatactaacgagaaaatgtgtagaaattatggagttattagttaacgtttttcgctattttatattgtttagtgaaaaaggattgctattaatctgtttaaaccttacatgttattatttttcacctttttgtctcattatcaaaaatttctgattgttttcagatatctgaagcctaaaatcaagctgaatataatttatacacgattggcataataataaataatttatttatcatttttgctagtaataaagttttgattaattcttcaggcgaaaatacaatgaaaaaatctattttatctatattggtagcatgtggggtacttgcatcacatgcctcggcaaataactgcacgggcgagttatatggtattaactctggtcgaggtcatttaggattcgttttttcaatagatgaacaagcgcaaagcgcagctgttcattcaaaagctgcgttttcatctgcagcgatagcatttgatagcacaagaaaccgactttattacgtagcagctccacgaccgctttcatataagttagatgtaagtgaatttaatttagcgagccatgaacttgctgacctgccgatacaaagtgaaaagtataaatatactcgtattgcttatgtagatatggatacaaaagaacacaccgttcttaatcgatctaatccgatgactcgtttagcgtatgatccaaatcgcgatgttatttatggctcaaaaggcagtaaactttatgttatttctcctgagtcaggtgagacgcagttcctaggtaatatgactggctatggcaatagctcagatattcttcgcggcgatatggttgtaaaaaacggtgaagtgtatttggtttctgcaaccagtatcttttcattggatctttctacacttgaattatcgaaaaagtctgaacatggtttaacaacagtaacaggtgctgcgctagaccaaaatggagagttattaatttcacgagaagttattaacgatcaaggtaattataacattacgaagttgtataaagcgtcgattgaaacgggcaaaacctgcgcaatgggtacatacccaatgcgaattaatgatttagcgttaaacacacttaagccagtcgcgtgttatagccagccaacttgtagtattggtgctcagccactagttatcaccagtattgataaaaatagaaaggcaacttggcaaaactatactttaaatgcctatttatttgataaaccaatagcaaaactgactagttcagcaaactttggtgaagatggtattgttaataaaacggtttcaataaatcatgattttgctgctgcaaactcaattactgaagctgctattgatgattacaatacagatatcttttttatgggaagttttcatgacaccgattttacagatgctgaacttgcagagctttacaattggtcaaaaaaatctggcaatgtaactattattgcggctgattctgatatgccgaatgaaaaagtctatgccaaatggggttatacagttactcgtaatggttatgtagatgggccaaatactcaaaaccctgatggtgttaatactcaagctcaacaagctattttcgctggtccatttggtggtgtaacgagtttctatcaagcgggtggtgctaaaggatatttttctgaaatgcctgcaggtacgcaagtattagcagttaatcaagatggcttgccaacgatagtaaaagactcagctactggtgatattttattgtctgatagcggtattgttaactctcaagacaaagttgaaaattacacctcaggtacaggtgtgtctagcatggcagatcgcttattcttaaacttaattaactacgctagtgatatagattaattcgcttcattttaaccatcgtgaagtaaaatactttacgatggttaattatatgaaaacttaattttattaattatttaaacgtttaatattgtagctcctcaatttattttttctctccttctctattttttatttttacttaatattaatgtttttcttttttagtttttaatcatctgtttttattgttctctctaaaaataagggttttcctattgtgttgtaatgatttaaaagtaaatattctactttgtagtatttaaataaaaattaacatttattacctttcttattttcaattagtagtaaataaggtttggttttatttttcaggtgaatataaaatgaaaaagtctattttttcgataatgacactttgcagcgctctctcgtcaggtgcctatgcaaacatgtgtactggtgagctgtatggtattaactctggccgaggtcatttaggtgttgtgttttcgcttgatgagcaagcaaaaacggcagcaattcactcaaaagcgaagttttcttcagcggcaatggcattcgatagtactcgtaatcgtctatattatgtgtcagcaccacgggctttaacttataagttagacccaagttcattgaatttatctgatgatgaattgaaagacttaccgattaaaggcgaaaagtataaatacactaaattagcctacgttgatatgcagacaaatacgcacacagaagttgcccgaacaagtccaatgacacgtttagcgtatgatccagaccgtgatgttatttatggctctaaagggagtaagttctatattatttatcctgattctggcgagacccagtttgtaggtaatatgactggctatggtaatagctcagatatattacgcggtgatatggttgttaaaaatggagaagtgtacttagtttctgcaaccagtattttctcattagatctctctacacttgaactatcgaaaaagtcagaacatggtttaactacagtaacaggcgctgcgcttgatcaaaatggtgagctgcttatttctcgtgaagtgattaacgatcaaggtaattacaacgtaactaagttatataaggcatctatagacacgggtaaaacatgtgaagtagcctcctatccaatgcgcataaatgatttagcagttaatacactaaaaccagttgcttgttatgctgagccaatttgtagcgtagaatcagagtcaatcgttatcacgagtatcgatcaagccagacaagctacttgggctggttatacgcttaatggttggttaatggagtggtctttagaaaaactaacaagcgcagcaaattttggtgaaaatggtgtaattaataaaccaatttcaataaatcatgactttgcagcgtcaaattcaattacagaacaagcactagataattacaatacagatatcttttttattggtagcttcagattgagtaatttcacagatgcagaacttaatgaagcatataattggtcactaaaaaagggtaatgttgcaattatcgcaggtgatgctgattaccctgaagagaagatttatccaaaatggggctatagagtaacagcctatggttatgtggatgggccaagtaaaccaaaccctgatggtgtaggttctcaagaacaacaaagaatttttgaaggaccatttggagaggtaactgacttttatcaggctggaagtgcaagaggttatttttctcagatgccagctggagcacaaattttagctgtaaatcaacaaggcttaccaactattgtaaaagaccctgcaacaggcgatattatcttggctgatagcggtatgcttacactccaacataaagcagaaaacatcactcaaggccctacggttaccagtatggcagaccgactactaatgaatctgtttaactatgccagtgaaatagactaactatttgctggttatgcaaaaatcgcgaagctttaagtgcttcgcgatttttaatataaaattattcaccagcaaccagttaaggtgtttttcactctattggtgtgctgtttaactaataaataattaactcccaccaataatacatggcagcttgcaagcacaattatccatggtgaaatactttgtgctaaaagactggccgttaccaagctcattagcatcaaaagcaatgacgaattcaatgcagtttgtaataactgcttaaagcgtaaatgtttccaacgactccaaacaatcagtaaaaatgcggtagtggggagtataaataatatacattcaattaacgtaacgaataactgagcgctttgagaaggcggagcagctgttgcaccttgtgaatggttagagcttaaggcaaccaatccaagcaccacagtgataaacatatttttaatattcattcataaactctaaactaataaatctttagcagctaaacacccaagcattcaaattaggcatgcgcgtttatgagctcttttgcattggctcttgccattttactgatgttatcgccagcgagtagtcgggctatttcatcaatacggccttcttttgtaagtttattcatttgcgtataggtttcgccgtctgcaatttcttttgcaacaaaaaattgttgatgcccagagcttgctacttgtggcaagtgagttacacaaataacttgtgtcgatttaccgagttgtcgtaaaagtttaccaacggctgaagcggttgggccagaaatacccacatcgacttcatcgaaaattagtgttggcgttgtaacacgttgagcaataataacctgaatcgctaaactaatacgtgatagttcaccacccgaggccaccttagaaagtgcttgcattggttgacctgggttagttgatactaaaaacgaaaccatatcaaagcccattgagcttggcgctttatcggtagcttgctgaatatcaatcgcaaacttgccattttccatcgataagttcgccatgctatcgctaattaattggttaagtgtttgtgcgtaactatgacggctttcacttaataattgtgctgcctgtttgtattgctcaagcgcatcatcaatttcactttcaagcgcacctaaacggtcactgttataactgattgatgctaactcttcactgatagattgatgaaactcaactaactcttctggttttatatggtgcttgcgggcaaggtccataatacctgttaaccgtgtttcaacttcatctaagcgagcggggtctaagtcagttacatcgacataactacgaatttcacggcttgcttcttcaacttgtacagcagcctcgctaagtagcgctgcaatgctcgataaactttcatcataactagcaagctcagcaaattgctgcgcactgtgttgcaacattgaacaagcacttagctcgtcactttcgtataagtgttgtagctcacgctggcatgactctaagatagtttggctatgacttagtttgtgatgctcagcttcaatctcctcaaattcacccggctgtaaagcaaattcatcaagttcagccacctgatactctaataactgcttttgagctgcttgttgctgttgctgctgctctaaatgattaaattctttgagtaatgcttggtaagctttgtagcgctctttaacatcagttaatagctggttgtggcctgcataagcatcaagtaaatgtaattgatgctcagactttaacaagtgctgatgggcgtgttggccatgaattgaaattaaatactgacctaactcttttaattgcgcagcggttactgagctgccattaatatagcttttgctgcggccatttttacaaataactcgacgcagcaaacattcgccgtcgttatttgaaagtaaatgctgttctaaaaactgttgggcgagcggaagttggctaatatcaaactcagcgcagatctctgcgcgttcagagcctgggcgaaccgcagctgcatcagctcgttcaccaaggcacaatgatagcgcgtcaatggcaattgatttacctgcgccggtttcacctgtaatggcggtcatgccattgtgccactcagtactcaagttactgacgatggcaaaatttttaatttctaacccaattaacatactgtttatccatccagctaattaactgttaatttatacagtgtttttgggttttgcaaattaaattttaaactttgcttaattctgcgttctgattttcttggtttatgtcttttggattcgatgagttcagatcttttgcttgttcatctgagggcattgtcggcggctgatacttgatgacttcaattagcgacggcaaagattcctgataaaatgacttgttgtactcaatgccattgtaaggaagttcagccatgaaatattgaaggcggtcagctaattgatctaattcttctggtgtctgcgctttgctcgcttccatgatgatggtatttatcaataaatcactgatgtattcaaggtgagcaaggttttcttcattatgagcttgaacaacaaaaaagttactcgtaatttgacttaaacgcgaaacatttttcggacgaataagtttgccttcgctaaagtcaatcaacttgcttttaaagtcattattaatttcttttacacgttggttaaaacgtttcttttcagcctcaatcgctttacgacggttgctttcaaccatccagtaacaccctagcaaggtgataagtaataacagagcaagaaaaacgatatagctcatttcggtgaagtatccttaaaaaattacagcattaagtatgattattttgcgctaatcaatctgccttggcaattatttaagataaaaattgctatttaaaatagccgacttccccaattaagtttttttctcaaaacatcatagtaggaatagtctttagggtgaattaagcgcaagtgtttatcggcttttttgataaccacttcatctccgggcaataccgccaaaaccacatgactgtcgcagcttacttgcagactgtcggtattttcgaggctgagctttaagcgcacttcgttatcggcatcaaccactaggggacgacttgataaagtatgtgggaacataggtactaatgaaattgcgttcagctcaggtgttagaataggcccgccacccgataatgaataagcagttgagcctgttggtgttgaaacaattaagccgtctgagcgctgtgagaacacaaaatcgttgttaataaaggcttcaaactcaatcatatgggcaactttatcggcatgaagaacagcttcattaaccgccaaattcgcactcttaagttcggcatgacgatagacttcaacttctaataaaaagcgtttttcttcgataaattgtccgctcaggacgtgttcaagacttgcttcaaaaccttctgggtttaaatcagttaaaaagcctaagttacctctgtttacacctataactgcaacatcaaagcgcgcaagaacgcgagcagcaccaagcatgtttccatcgccgccaacaacaatggctaaatctgcccgctcacctaaatcaactaacttaactaagttttctgctggtacgttgtcaagttggcgtccagttcgttgctcgacgagcacttcaaagcctaaggcaagtaaaaaagtatgaaggcgttgcagggtcgtggctgcggcgctgtgattaggtttgccaatcaaacctatggtcttgaacggtgaatccatgttaattgcacttaaactttcatggcaatagattacattaaaaattaatgctttgaaaataacttgaaataaacttgcagcgcccaaatatctaaggccaaggagcaagatgtattaattatgaaattaaatccgcgtgaccaacaaatattttcagcagtaatgagcctttattgtaatggtgaagggttgcctgttgcttcatcacgaattgctaaacaaaaaggcatggctgtgtgctctgctacggtgcgtaatgcgatggcacgtctcgaaaaagagggcttattatattcacctcatacatctgctggccgtgtacccaccaatgaagggtttgaatattggctgtcagagttttttgagttaccgcaaattgcaacttattggcaaccacagcaagcccagcttgttgaattagctcatggcttgagtcagcgttacaaggtctgttgttgtgttggcttgccacaggtaagttcacaactggtttttcgtgttgaagtacttgattttgatgctagcaactggcttattttgttgcttgatagagcagggcaaagccacaatatttgtatcactaaacctgaggattcaagtgatgctgtgcgttatcaatttgcgacttggctaaacacggtgttcagtcaacaaaccctgatggaaggattgtatcgcatgcaggcgatggccaacactgcaccgcataattgtcatgattcactcacacaatggacaagacagttaagtcaaaaactgggctctgataatagcattgtggtgggcgaaaattatctttatcgccaagttgattgccaaaccagtcttaatattggagtatcatttttaaatttcgttgaagataagttggcatttaaaaatggtttatcggttcttaatacagaacaactaccatttactgattgtgatgagcttatggttatcagtgttccgtactttaataaccaagaatatcagagtcgattttgtgttatttgtccaaaatcagcacaaatagaagcaatcatccaagaatttgagttaatcggctcatcagcctcttgaatctttttattcaatccccataattaccgcagttgtaaagaattggagcatgtaagctatgtctgagcagacaaaatcaccagagcaagaagttgaactaaacgaagaatttgaacaaatgcaagcggatgttgatgcagccgttgaagcagcagagcaagttgaaggcgaagaaatgagccctgaagcagaaatcgcgctactgcacagcgagttagaagctgctaagcaaactataaacgatcaaaaagacagtgttgttcgtgctgcagcagatgttgagaacatgcgtcgtcgtgccgctcaagatgtagaaaaagcacataagtttgcacttgaaaagtttgctaacgaattactacctgttatcgataacctagagcgtgcaattgagttttctgataaagaaaatgaacagcttaaacctgtgcttgaaggtatcgaaatgaccgttaagagttttaatgatgcggtatcaaaattcggtgttgaaattgttaatcctcagggtgaacaatttaatcctgaatttcatcaagcaatgtcaattcagccaagcaatgacgtagcacctaacactgtccttgcagtaatgcagaaaggttacacattaaatggccgtttattacgtcctgcaatggttatggtatcgaaagaagctgaataagctttaaagagatagaaaaaatgcctgtaaattacaggcatttttttattacaattgtgttcaatatttaagtcgattggtatcgttttcgatgccaaagctgtacaagtaatatcagtatcagtgcgctgaacatcatcgcagaaaatggaatagcactttgtggatgaacaaaagcaaggataggcccaactaaagcaccactaccgaatctcagtgtaccaataacagctgttgcagtacctgacttttcttcaaattgcatgagaatcaatgagtctgcattactcgctataatacctaagctcatcattaatggtgcaatggtggcaacgatgaaatatagcgaaaaatgcatcacactgaataataacaatgccccgccagcaacaaagccaatgccaaggccaataaataaaagtttacgagagcctaaacgtggcactaaacgtgtattcataaagttaccgaacattaaagccaacacgttaaaagcaaatagcacaccgaacaattgctcatctactttgaagaaatcgagatatacataaggcactgatgttaaaaagcaaaagaatgcgaatgaggcaaacattgagctggcaatatcggcaagtgcgctgcggcgtgaaaataccgttttataactattgaaaaacaatgctaaaccgcgctgtttacttttaaatataggaatatcgatcaaatgtatttggactaaggctaaaattgtaaagctatagcctgctagaacgataaaaataacctgccaggttgagatgcccataatgagtgagccaagggtaggggctatcagtggagccaccatcataatcatagacacatacgacatacctttagcggtattttcgcggtaaatatggcgaatgatcccgggcactacaaccgtcgcagcagcaccggtaaaagcttgaatggctcgtaaagaccaaaacaattcaatattttggcaaaatgccagagccaatgagctaataccaaataaacttaagcctactttagcaagtagtcgtctgccaagctcatcggcaattggaccaaaaaacaacatgccaagggcgtaacctgcaagataaatgcttagtgaaatttgcacatttggcatcgtcgtttgcaagtcgtttgcaattaccagcattgcaggtaggtataaatctatggcaagaggggtaattgcaacaatacttgccagtaacggtaataaaatgcgtttatttaaaatctctggggaaggcattggttactcattaatcgaaagttaggtcactattgtagcagtatgaacccctgtggtgaacttagtttgcctgctaagtaaaagaattaacgaaaaaataacaactgataatgaggtcgttcattttcatataaaattaagcaatgctttgctatattagcgattattgcaccaagtatttcaaggattcgtatgaaaaagttattgatggcagtgttagctaccgctgttttagctggttgtaaaacctcaccaacaggacgcacgcaaattgcgctttactctgatcaacaaatgaatcaaatgggacaagccagttttgcagaaatgaaaaaaacgcagcctgttaataaagacccacgagttaatagctatgttaagtgtattgccgatgatgtaatttctgtactgccaaatgagtatgcaaaacagtcttgggaagttgtagtatttgaagacgattctgcgaatgcattcgccttaccggggggttatatcggggttcatactggtttattaaaggtagcggtaaaccaagaccaacttgctactgttttaggtcatgaagttgcacacgtgatagctgagcattcaaatgaacgtgtttcacagaatgcacttttacaaactggcttacaagttggtggtgcggcacttgatatggggaatgtgcaatatcgaggcgaaatcatgcaggctttgggtttaggcgcacaatatggggtggtattaccatttagtcgctcacatgaatcagaggcagatattgtaggtcttgatttaatggcaaaagcaggatttaaccctgagcaatcagtatctctttggcaaaatatgagtgcagcaggtagtagtggtacacccgagtttatgtcgactcacccagctccgggtaaccgaattaaagagcttcaaaagcacatgtcagatgcattaaaagctcaacaagcggctagagcgaaagggaaaaccccgcagtgtaaattatgatcaatagagcaaaggttgaatatcaacattttgccaataatattttttattctcataaatacacacttttcctgggtaagttgtctgctcgattgaaggagcggatagctgctcaggaataccacatttttgcgccagactaaccatagctataccctcaattaaaagagtaatatctatatctttccaattacaatcattttcttggcaaaaacaggcttttccgtcgtaagtaacttgatcaagttttggcattgagtaaggttttggtaaaccgcattttattgcaggtttaagctcagttgtattggctaggaaagaagtagttaaagctagtaagctactaatgataaatgatttattcatgaggttctcctaaaatctaactgtagaaccacgatcgaatgtatgtcaaattttactctaaaatttaaaaagcctgtagtttagataactgcaggctttaatttgataactagcaactagcaactagcaacttagcaactagttaaaacgtccactcaacgtgaagttgtggtactgactcagtagtgtctgtacctagcttgttgtgccagtattgccactcaagacctagtagtagcgtattttctttcatgctcattgcatgacctaaatcccaagtaatgattggctgtgctaaaatccacgcttttacatcttcaccaaattcattttcacgttcagcgatgtattcaacatggcctgttacattgaacttttgtgagccaatagtaaatgggtaaccccatgcaacatcaatcatccagctgtttgattcagttggtgcgccaccacgtgctacgccttcactgtcatcaatgtaagcggtgaatagggtagataaaaagctaaagcccggagcttgccagctcaattttacacctggtaaatatttcagtacttttgcgtcacccgctgcattaaaacctgctgttaagcctacatcggcaattgcgccgtatgaaaagtcattgccagagatttttgataagctaaatgttgaataccactcgccataaaagtctttgtcttgatagccatcttgacggtcgtcattgctgtaatcaataaaaaagaagttatcgccatagtcgtaaccagaagcgtgttgcaatgaaacaaccgtggtatttgacttagttaatgaaaacggatttttgtgttcaccgttattaacgtgtaattgcgtagagctccaattagcggcatagcctgaagtacttactgcacatagcgcagcaacagaaaggatctttttcaagttcatatctcaatattgatggtgtaaaggggatacaaaggcaggattatagcagatacgccctaaattgggcgtatcttggcaaaaattatttaacttatgctttattccgacgtaagcaaattaccgctactgcagtaaaagcaagaataaaacaataataagatgatgttgatacttcccatgggctaattttaaaagtagcacccaacaatagcgcttgtgcgccataaggcagtgagccttgtgttacacaagcaaaaatatcaagcaagcttgctgaacgcttacctgtaatttcgccatcatccgctaattttttagcaattgggcctgcaacaataattgataccgtattattagcaatacataggttgctggtcataacgagggctgcaatccctaattgatccgcaactttacggtgccatttagcgataactttagtaattgcttgaattttgttagcaatataatcaagaccaccattaatacggataaattctgaaagtccaccaataaacatcgatagcaagaaaatttcctgcatttcggtaaagcctttataaacatctttaacaaaactcgccccttcatagctgccagtaaagcccatgagtgcagcaaagataataccgctaaatagcaccacaaatacgttaaagcccattaccgctagtaccaagataaaggcataaggcaatactaataaaatatcgaagtcttgagtttctacagcttctgcagtaggtgttaagaaaaataacaaaccgattgttaatgctgcagcaggcagtgcaatttttaaattttcgcggaatttatctttcatttcacagccttgcgtgcgggttgcagcaatcgttgtgtcagagataattgataagttatcaccaaacatggcacccgatacaatcgtgcctgccatcagtgatggatcaatacctgttttttgggcgacggcataagcaatcggaccaatagcaccaatagtacccattgaagtacccattgcagtcgacacaacagcggcgattaaaaataatcccggtagtaataatgctggcggtataagtgataaacctgcattaacaacggcatcaacaccacctgttgcaccggcaaccgcagaaaacgcaccagcgagaagatatatcaaacacatcgtgatgatattgctgtggccagcacctttaataaaggtttcaacactgtggttgatggtatttttatttaagataaacgccagcatgatggcaggtaaaattgccactggagcaggtaattgataaaaagcgtaatcaacaccttgagattgtaagtataagccagcgcctaaaaataagccgacaaacaccaaaagcggcagcaaagataattttgcttttgttttattaaatgatggctgcatcatattcctcgttagataaccaataacacagccaaagacttcttttagctgtatttagttgtgtctaaaagacatcaacagcgcccgcaagccaaagaccaaatcggcgcaaaggaagaagtttaaatgtatagatggctaaatgcaaagactatctgttattattgttgttattttataaaacataaactcagcataaattagctcagtgttttttataagctaacctgactattacatgagttttcgataaaatctagccagctaataagaataggtaaggtaatagtatgaatcgtataggtgtatttggtgcaaacggccgtatggggctggcacttttagaagctgtcacaaaaaaagaagatgcaactttaacgggcgcgtatgttcgtgacaactcgccacttttagatattgccgttaatcaattaaacagtgccgcaacagctgatgtgtcatttagtaaagagtcagatgtaaaagatactgatgtgctgattgattttaccttacctgcaggtatgcgtagtcatttaaaaacagccgtagaaaaaaatatcgcgatggtaattggtaccacgggtcttaatcaagacgacattgatgctttaaatgaagcagcaaagcatattccgattgtttttgcgcgcaattatagcgtaggcgtgaatttactgcttaacttagtgcagactgcggctgtgaagtttggcgatgacatggacatcgaaatatttgaagctcatcatcgtcacaaaattgatgcaccttcgggcactgcgctggcaattggagaagcaattgctgaggcaaaaggctggcaacacgatgaagttgcacggtttgacagaagcaatgacgaacatgcaaaatcgcaaaatgaaataggttattcggtcatgagaggcggagatatagtaggtgaacacaccgcatatttcgcaacttctggcgaaaggctagaattaactcataaagcaagttcaagaatgacctttgcattaggagctgtaagagctgcgggctggttgaaaaataaaccagctggactttatgacatgcaagatgtgcttgacttgaagtagtttagtttgatttttggcagtttcagcgagtttttagttaatagcgcttatttttactattttattaattaagattagatctacaagctaaattactgtagaatagcgccaatttgccaaaaattcataaatgcgtgtttccaatcgctataaacgggcagtagagcaaatgactttactcccgttttttactgttaggaggttaacttgactaaatccgctctgttagtcctagaagacggcacagtgtttcgcggtactgcaatcggcgctgacggcatgtcagtgggcgaagtagtattcaatacgtctatgactggttatcaagaaattttgactgacccttcatacgcggaacaaatcgtaactttgacgtacccacatatcggtaatacgggtactaacagcgaagacgaagaagcgggtcaaatctgggctaaaggcctagtgatccgtgatttgccactgctagcaagtaatttccgtaacgagcaatcgttaagtgattacttaaaagaacgcaatatcttaggtattgcagacatcgacactcgtaaattaacacgtatcttacgtgataaaggcgctcaaaatggttgtatcatcgcgggcgacgagttagatgagaaaaaagcgcttgaagctgcgcaagccttcccaggcttaaaaggcatggatttagcaaaagttgtctcaaccaaggaaaattttgagtggcgtgaatcaagctggacattaggttcaggctttaaaacgctagaagcagcagacgagaagttccacgttgttgcttatgacttcggtgttaaacgtaatatcttacgtatgttagtagaccgcggttgtaaattaaccgtagtgcctgcacaaacatcagcagaagacgtattagcacttaacccagacggtatcttcttatcaaatggcccaggtgatcctgagccgtgtacatacgcgattgaagcaattaaaactttccttgaaacagacacgccaatttttggtatttgtttaggtcaccaattacttgctcttgcctcaggtgcacaaacagtaaaaatgaagttcggtcaccacggtggtaaccacccagttaaagatcttgaccgcaatgttgttatgatcacagcgcaaaaccacggtttcgcagctgatgaatcaacattaccagcgaatttacgtgcaacgcacgtttcactattcgatggcacgctacaaggtattcaccgcacagataaaccagcatttagcttccaaggtcacccagaagcaagccctggtccacacgacgcggcaccattattcgaccacttcatcgacttgatgcaagcacgttcaaactaatttaaccggagtaacaatgccaaaacgtaccgacataaaaagcattcttatcttaggcgcaggtccgatcgtaatcggtcaagcttgtgaatttgactactctggtgcacaagcgtgtaaagcactacgagaagaaggctaccgagttattcttgtaaactcgaatcctgcaactatcatgactgaccctgaaatggctgatgcgacgtacatcgaaccaattcactgggaagtggtagagaaaatcattgaaaaagaaaagccagatgcagtacttcctactatgggtggtcaaactgcattaaactgtgcacttgatttagataagcatggtgtattggctaaacacggcgttgagttaatcggtgcaactgctgatgcaatcgataaagctgaaaaccgtgagcgttttgacgctgcaatgaaaaacattggtcttgagtgtccgcgtgcagaaatcgctcactcaatggaagaagcacacgatgtactaagccgcatcggtttcccatgtatcattcgtccatcattcactatgggtggtaccggtggtggtgttgcatacaaccaagaagaatttgatgaaatttgtgagcgtggtttagatttatcaccaacaaatgaacttttaatcgatgaatcattaatcggttggaaagagtacgaaatggaagttgttcgtgacaaaaacgacaactgtatcatcgtatgttctatcgaaaactttgacccaatgggtgttcatactggtgactcaattacggttgcaccagcgcaaacgctaacagacaaagaataccaaatcatgcgtaatgcatcgatggcggtacttcgtgaaatcggtgttgaaacaggtggttcaaacgtacagtttggtgtgaatccagtagatggccgtatggttatcattgagatgaacccacgtgtatcgcgttcatctgcacttgcatcaaaagcaactggtttcccaattgcgaaaatcgctgcaaaactagctgtaggttacacccttgatgagctacaaaacgacatcactggcggtaaaacaccagcgtctttcgagccgtcaattgactacgttgtaactaagatcccacgctttaacttcgaaaaattcgccggttcaaacgaccgccttacaacacagatgaagtctgtgggtgaagttatggcgattggtcgtaaccaacaagagtcacttcataaagcattacgtggtcttgaagtaggcgcaacgggttttaacccaatcgttgctcttgatgacccgaaagcgaaagaaaaaatcatccgtgaattacgtgagccaggtgcagagcgtatttggtatgtggcagatgcaatgcgtcacggtatgagcgtagaagaagttttcgaactaactaagattgacccttggtacctagtgcaaatcgaagacatcttaaaagacgaagcaacaatcagcgaagttggtatggctggtttaaatgctgagttcttacgtaagcttaagcgtaaaggtttcgctgatgcgcgtatcgcagaaattgccggtgtctctgaagcagaaattcgtaaaaagcgtcaccagttagatatcgtgcctgtatacaagcgcgttgatacctgtgctgccgaatttagctcagacacagcttacatgtactcaacatacgatgaagagtgtgaagcgaacccatctgacaaagataaaatcatggtaatcggtggtggccctaaccgtatcggtcaaggtattgaattcgattactgctgtgttcacgcagcattagctttacgtgaagacggctatgaaacaatcatggttaactgtaaccctgaaactgtttcaactgactatgatacatctgatcgcttattcttcgagccaatcacgctagaagacgtattagaaatcgtacgtgttgaaaagcctaaaggtgttatcgttcagtacggtggtcaaacgccgcttaaacttgctcgtgcacttgaagcgaacggtgtgccagttattggtacttcaccagatgctatcgaccgtgcagaagaccgtgagcgtttccaacaattagttgagcgtttaaaccttcttcagccagagaatgcaacagtaacttcaatggaagaagcgattgcaaaatcagctgaaatcggtttcccacttgttgtacgtccttcatacgtactaggtggccgcgcgatggaagtggtatatgatgaagacgatttacgtcgttacatgactgaagcagtatcagcgtcaaatgaagcgccagtgctacttgaccatttcttagataacgcaatcgaagttgacgttgatgcaatatgtgacggtgagcaagtaatcatcggtggtatcatggagcacattgagcaagcaggtgttcactctggtgactcagcatgttcattaccagcgcactcattaacagctgaagttcaagacgtgatgcgtaagcaagtgactgatatggcacttgagcttggcgtagtaggtctaatgaatacacagtttgctgtgaaagacggtaaagtttacttaatcgaagtaaaccctcgtgctgcacgtacagtaccgtttgtttctaaagcgacaggtatcgcacttgctaaagtagcggcacgttgtatggcgggtcagtcgctggcgagccaaggtattactaaagaagtaattcctccttactacagtgttaaagaagtggtattgccatttgctaagttccaaggtgttgatccaatccgtggcccagaaatgcgctcaacgggtgaggtaatgggtgttggtgaaactttcgccgaagcattcgcgaaagcacaattaggtgcaagcaacactttaccacgcggtggtcgcgcgttactatcggtacgcaacagtgacaagccacgtattgttgagctagctaaaaccatgactgaccttggttttgagttagatgcaacgggtggtactgctaaagcccttgaagaagcaggtattgcagttcgtcgcgtgaacaaggtattcgaaggccgccctcatattcttgatagaattaaaaatggtgaatacagctatattgtaaacactactgaaggtcgccaagcgattgaagattcgaaggtgttacgtcgtggtgcattacagcacaagacaaactacacaacgacactgaacgcggcatttgctaactgtactgctaaccaagcagacgaccgtagcagtgtgacgtcagttcaggaattacaccagcgaatgaactaaggaaatgtgccaagggtgatacattcacccttggattaagtgagaataatatgcaatcaattccgatgacagttcgtggtgcagcattactgcgcgaagaacttaacgaattaaaaacagttacacgcccaaaaatcatcgctgatatcgctgaagcgcgtgaacatggtgatttgaaagaaaacgctgaataccatgctgctcgtgagcaacaaggtttctgcgaaggccgtattcaagaaatcgaagcgaagctttcaaatgtgcaaatcatcgatgtaactaaaatgccaaaaactggcaaggttatttttggcactacagtgactatcgttaatgttgaaaccgacgctgaggtgaaataccaaatcgtaggtgatgatgaggcagatatcaaaaataacttgatctctgttaactcgccaatcgcacgaggtttaattggtaaagaggtagacgatgccgttatcattaaaacaccaaacggtgaggtagagtacgaaatcattgaagttgagtatatttaatagcttaaccaagcattgataaaagccgcggtttactaccgcggtttttttatgcctgtttacaggcgtggatttattcggtacgttgggggctcgttaaacggaataaaggagtagtaatggctaaaattcagtatcctaagccaatagccaaaggtgacaaaatagccatttgtgctttttcctctggtgttgatgaatcatttcataagcgattagatatagtacttcaaggtttaacagcgaaagggtttacaatcattgaaggggcatgcttacgtcaagagcataaccctgcaaagcaacgtgcagaagaattaatgcagtttttaactgatgactcgattgcagcgattatgccgccatggggaggcgatctcaccatggagattttatcattacttgactttaacgctattaataatgctaaacctaaatggttggttggcttttcagatatcagcacctttgcatgtgcattaacgactcgttgtggttgggcgactttacacgccgcaaacttaatgcaaattcatccagatgacaccgatcagcatttgcaagatatatttaatgcaatggagctggaagaaaatcagtgtttacatcaagttgcttctcctttctatcaaaaagaggcaattgactataaagcaaatccaaatgcaaaatttaatctaaatgcaccgagccaatggcgctgtattaactataaggataaacgtcagattgaagtttctggacgacttattggcggctgtttagacacgttagggttattattaccctcaaattactatgctttgcatgaatttaaaaagcagtatgcgccagaaggtttagttttatatttagagaatgcggaacttagcccgatggcattagctagatgtttattgtctttaaagctaaatgatgtgtttactgatgttaacgcggtgatatttggtcgtagccctgcaattaataacgactgctactttgatgaataccaagcaatagagcttgcatttaaaggcaatttgttcccggttatcgttgatgccgatattggccacgtagctcctaatttagcactaataaatggtgctgttgccacaataacggcagatttgtatgaaggtgtggcgagtaatgtcatggtgaaaactgacttaaaataaatatcacgccggttttaccggcgcgattgaaaggcttgttacacgactgtaactaccgcatctttatctaaacgcgattttggtaatgcagcgttataatcttgctcaggctcgtgataaccaattgcgagtgctacttcacaaacatagccgcctaattcatctgcaaaaagctcaccgagtaagtctttatctacgccttccattggggttgaatctatacctaaacgagcgacagtatgcatggtattacctaaagcaatgtaagtttgagcttttgtccaatgtgcgttaactccttgctcatcagtatttaaatcaacgaaagcgaatgcgccaaatgcttgctctttgttttctgcttttgtacgaccattggcaatatcagcatcgattaccttttcataatcagcacgtttatagcttgggttataagcaaataaaatggtgtgtgatgctgttttagcatgtacttggttaaactgaaacttatttgcaaaactatcatgcaaacgttgcttagcttgatctgattcgatgactacaaacttccatggttgagaattaatagacgatggcgataagcgtaatgcttctaaaattacagctaagtctgcttggctaatgtgctttgaagcgtcgtaacgtttacttgtgtaacggcgttgtaagtcagaaataatagggtgtgtcatgatttgctcccgcatgtataacaattaggtgcagtttacgccttgtatactttgcgataaagcgcataatcgaataaacattatcaaaaaattttagttaatatgctggttgaagatctcaaattaatcctcaaggttgctgagtttcgcagtattacaaccgcagcagcaaagttagacatgcgagccgctaccgccagtgcggcaattaaacgtgttgaagctgcgctgggtgcagagttgtttgttcgtacaactcgtcatttgcgcttatctgcggcaggggaacgttttttaccacaatgtcagcaagctgtgctcatgctagaacaagcgacacttgccttaaaaggtgagcatgatgaaattgaaggggagctaagagtcgcactatcgtcagatttaggccgcaacattattattccttggttagatgagttactcgatgaatatccaaagttgagtatgcgcccgcatattagcgatagtaatgtcgacttttaccgagactccgttgattttgcgcttagatatggctcgccatctgattcaaacttatatggttttaaaatttgtaatgtgccacgactgttatgtgcgaccccagagtacattgccgaatatggcgcgccaacacatcctgatgaattaacccagcatcaaggtttattttatcaactgcaagatatcattaataatgtctgggattttaccgatggaaccgaacgttttaaggtaaaaatgcaaggccgccgagcatctaacgatggtgacttggtaaggcgttggtgtgtggctggtaaaggcctagcagtaaaatcttgtattgatatcagtgatgatctattaagtgggcgggtagtgccagtaatgcaaaattaccctcacttatgtgcagagctttggctaatatgcccaagccgtcagtcaataacacccgcagttcgtttagttcgtgatatatgccgagaaaaaaccaaggcgattctcaatcaactgattgaaaaagggattttagataagcgggtactcgataactaattattttaggtatagagtagctgagcttgtttattgtaatttctcaattgcttgtttggcactttcactgtcagggtttagttttaacgcacttttgtaacttgctaatgccttttgtttatcaccggcagctaaatatgcttcacctaaactatcaaacgtatttgcggactctggataagattgattgttgagttcaaacactgttattgcggcgtctagctcacccatctgcattaattcatagccaaagtagtttagcgacctttctcttggcgtattgtcatcactcaccatttgctgataggttttctttaaccctgcaataccttcatgtttaaatgcgttataaagtttactatctgcatgctctgtcgctttttcgtagggtttgccatagtagattgcaagtaagccattagtcatgggagtgagtggcgcaccaccggtgttatttaaaacgataaccagtaatttgtcttcgattatcctacttataaatgcattaaaaccattgatgccaccaccatgttgaatacgtgttagggcttttccgtaggtgcttttatcaagatttgttacttcccaaccaagcgcataatttctttgctcagaaacttgatacatctgcttcttatactctttgttcaataacttatccgagtaaagagcttgatcccattttagtaaatctcgtgctgttgaatacatagacccagcagcatacgggatagacatatctaaataatcagtattgctatagcctgctaggccgttgtcgtaacccgatacgcgaaatttaatgattttattgtgagaatcatagcctgtatccttcatatcgagtggatctaaaatattcttctgtaatacgtcttgatatttttgacctgttaccttttcgattaccgcgcctaaaataaaatagccagaattgctataacgaaattcagtgccgggctcgaacactagatcatcactacatagtaagcgaataaattcatcaacactgtaggggtttcggctgtactcatcccgaaacgatttagcttgggtataattaccaagaccagaggtgtgattaagtatttggcgaagagtaattttagtggctatatcatgtctgtagtcaggtaggtattttgcaaggtgatcatcgagtttaagtttaccatcttgtgccaattgcagaattaacatggcggtaaattgtttggtaattgaaccaactctaaatttacttttatcactatgctttatatcccattcaaagttggcatagccaaagctttgttcaaacagtacttttccatcttttgcgactaatacattaccattaaactgcttgtagtcatgaaagccttggataaaatcagccatctcttcctgcatgttttggctgtgtgcaatgcttgaagttgcgagtaaataaaaaactacaagcaaccttaatttcttacagaatatgttcattactgtccttgttatttgttggttacattaacctatgtaaaacctcattgcgcatggcttgattgataaggcttaccattctggtgtggtctaaattactgtaatgcactacagatacactcccattttgaagtgcttgccaataaccagcggggcttattggatctccgttgctgagatagagtgttgttctaactgatggctgtgtgtcattgagtagggtgattaaatttcttcaataccactgtctcaaatcacctcttcacagtgattttcccttcctcacaataacttagcaatcaagcagtaataatgcaatcggataatatataagcaaggattataagaagattgtattaccacctagcggtaaatcctcgattatctatgtgaacaaaaccaccgtggtgagaggcgggtttatagcgaccgataccgccgttataacggctctgtttttgaaatttttcgaacactttataaagtacatcaacatcagcaatcgttagtttaccatcgccatttaaatcgtccattcggccatcgccattctcatctatatataagtcaaaggcatcaccatattggtgtcggctgtgtttgccattaccaatagagcggttgtagtggggggttcgatagccactaataaaggcaaatttgctgactttaatcccttcattttgtacaaacgtgagtaactcttctagcatcatcaagccgtcgttatttatatataaatattttggaaagtcactcacttgcttacaaattacatttttaatttgtacatgaggagtaagctggcgtgataagtctttttcaaaaatttcgataaatccgtttggcgcagtgtactgtgggtaatttttataaggggcagggtatagccctatttggtaattattcaattgtttattgtctgaattgaaaggctttttcacgataatgagcaagtgtttagtgactttaccattactcaatactaggttgtagaaacccgcattgttgggcgcatttatggcaatgctggttggtcctagtcgtgctgtttcaacatctgatacagcagtaggagtaaaatcagccgtgttatcaagagtcagaacttggtttgcatctaaaattaaactatgtaacgtgtcacttagctcaatggctagagtccgctgggcattgataacgaaaaatagataaaaaataacacggcttaatttcataattttccttaaattgaattattagctaatggcgtagttaacttttttaatagttctgcatcgcggttataaacatcgctataaaaatgaaggccttcctgatcgttccctgagacagtccagtacattaatagcacgtctaatggtttagataagctaacttttttagtttcttttgcggcaatagtgtcatcaatgtcactgcgagaccaattatctgaggttcctaagattttttcagctaaggtgaaaggatcatcgactcttacacaaccgtgactaaatgcacgttggtcttgctgaaataggctttttgctggtgtatcgtgcaaataaattgagtatttattgggaaacataaatttaatttggcctagcgagttattctctgatggttgttgtacaaaccagtacggaaagttcttccggcttgcatttgcccaatcaatactctcactatcaactgggttacgacggctatcaaccacaacaaagtctttttcatttaggtagttaggattttctttcatttttttgataatgccacctgaaatactacgtggaacagtccaagttgggttcatcacgatataactcatttgccctttaaatattggggttttggtgtagtttctgcctacaactacattggtttgccatttaagcttgttatcttcaaataaatacaacttataaccagcaatatttacgatcaaaaaacgttctgtgagcgtattatcaacccagcgaatgcgttctaaattaactaaaatatcattcacatattcgctgtagtctttattgagaagttttaaagttgcaccgccaataataccatcgtcatcaacttgatgagcgtattgaaattttttgacagcatcaacaagttcatcatcatactcggaagcatcagataggttaccagtataataatttaagcgatgtagtttttgttttaagagcggtacggctgggtctgtttgacccggtttgagtgctttactttgcaaggaaattgcaggtagctcaccttttgcatcaagctctcggtaaaatactagcgctttctttaacctttgataatggggtaatacgggcttaaggttgtttaatcctttatcaagactcttagatttgacatgtttgagtaaagaagctgctgcagcatcagggctgacatcaaattgttcatagttccatgtagatgctagctgttttgggttaactttaccgcggatcaaatgtttcgcataggtcataattgcgtcagtcattagtacgtcaaactgtgcctcggctgcatcagtgccacgtttatctacttcatctataagtgccagtaatgtatcaaagtgataatcgttgggtgaaagaccttcaagttctgactgtgcgattaagttgagtacttgctttgcatatttaatgtcagcccaaacttgctcaaagccatttgccttgtatgtggcaatggtcatttcaggggagtggatctgctgttcttcaatggtgtgtgattcaccaatgagaataggttcaagctgttgttgcaagtattggttttcggctaatacaggtgtgcctaataaaaaacaactaaccaaagccgtttgacgaaaaaatttcatagctatgtccttataacgtattaggtttgagccagagactcatttattaaatgctaatttaagcttagcaaagcaatacaaaatataggaacaaatttacttattttttagtaatagtaatccgtattaatattaaaaacagaatactttatctagtgagtagatatattaccaagcagtaattcttagtcattttgatgaattaaatctatcgttaaaaattacttatttacgacagcatgaataccagagcaatagcaatgcaagaacaactcaataacaaagtttttgccttgtaatcaacgaggttttattgtctcaaaatagacctgttaattaagtgaatagatataaaaaacgcttggcaaactactttgccaagcgttaggttgggatagtggaatattattagttactacttgtctgtaactctgattcagttggtgtttttttacctttcagtttacttattaggcgtttaaaatcctcaagtgcaacgtactgacatggaattaatatcagtgtaataacggtcgcaaataacacaccaaaagcaagtgaaaccgccattggaataactattttagcctgtaagcttgtttccataatgattggtaatacaccaatgaatgtggtgattgaggttaataaaatagctctaaaacgtcggccaccagcctgcatgacagcctctttaattgctacaccttcagcgcgagctttattaacaaagtcgaccattactagcgagtcattcactacaaccccggcaacagcgatgataccgaataccgataggctactcatcgtcatacctaagatcatgtgaccgaacatcgcaccaattacgccaaatggaataaccgacataataatgaatggttgcgagtatgagcgtagtggaatagcaagtaacgcaaagataatcatcattgataatgcaaaatcacgtacttgctctgccacactgtccatttcttcttgaatacggccagctacattactttctacacctgggtaacttttcaataggctaggtaagtagtcgtcacgaatttctttagcaatggcaaacggctctgcttggtcagtatttaccgcagcccatacgtttacggtacgtttagcattttcacggcgaatgcggtttacgccatcaacaatattaaccttagcgacttcagcaagcggcacttccacgccagtgggtgtaatgatacgtgcatctgtaatgtcacttactgcatcacgagattcacgagggtagcggatcattactttaatttcttcaccatcacgtaaaatacgttgtgcttcaaggccgtagtaactaaagctgacttgtgatgccacatccgatagcgttaagcctaagctgtaagcaagcggtttaagttcaagttgtacttcatcggttgctgattgtagtgagtcattaacatcacccacaccttccatgctatttaatttctcttttaacttagccgcaacctcttttagcttgttgatatctttgccttcaaggcggaagctcacatcgccgtcatcacgacctccgttcatgatactatcttcaatattaagtgttttcacacccggtaatggtggcatttgttcgcgccacatagcacttaattggaatgtatcaatagggcgtaaatcgggttcaactaaaattgccatgatacgagcacttgtacgaccgcgtaaactaaccgataagtcgcggatcattgcttgaccatattgctcttcaagttgtttatcgacatctaaaatcagcttctcaatagtttgtgctgtttcaagagttgcttgctcagatgaagataggttcatttcaacagagatacgagggaaatcatgcggaattttagggttcgcaacaaatttcactaaaccacccgcaaacataccgccactgacaataagtacacagataaaaccaacaatcacggtgtagcgatagtgaatacagtgaccaataaatggagtgtagtaattatcaacaaagttcttgaggcctttatccatacctaagcgtaaacggtgtaacgggtttttaggatttgcaggtttatttttcatagccgctaagtgagccggtaaaattagttttgactcaatcaatgagaaaattaagcaaaggataattacaccaccaatggctttagaaaacgcagagccagggcctgatgccaatgtttgcggtaagaatgcggcaattgtggttaacaccccaaaggttgctggaatcgcaacgcgttttacgccgcgtactacgttatcgagactgtgaccgtgtttttcaatttcagcactggctgactcaccaaccacgatggcgtcatcaaccacaatccccagcaccagtataaatgcgaataaagaagctaagttaactgtgatgtctataaagcccagaggcatcattaaaaatgcacctaggaatgacacaggtaaacccatcatgacccaaaatgctaagcgcagtggcaagaatagggcaagtaccaccattactaaaataccaccccacaccatgttgtcgatcatcatgtttagacgaccttcaaggtagtaagttaaatcaacaatcggtgatagttttacaccagcaggaagctgtggcgctttatctgcaaggtatttttttaataccgcagcaactttagtgatgtcttgatcttttgatgcatttacttcaaaagtcagtgaatttttgccgttgtacttagagtattgtaagccttcttcaaagccatcgttaattgttgctacatcacctaataacacctgtgcgccatcaggtaggtgtaataaaggcagattttcgaactctttgccacgatatgcttggttttcgacacgcatcgaaatgtagccattttcagagcgaatttgacccgctgacatattggcagagaagctacgcacggctgtggcaatatcacggaaagttaaaccatactcacgtagtttatctgggctgatttcaatgccaatttcgtagtttaagccactgtaaaagttgaccaagtttatttgtggtaaagcttgtagctcatcttttatatcgttaccaagctctttgagctggtagttactcatatcgccatacaaagcgagtatcatgacttcttgctcaaacttttcgcggcgaacaatagggcgttccatctcagcagggaaggtattgattgaatcaacctgcatcttgatttcgtcgagtacttcttgcgggtcgtatttttcttcgatttctatccaagcttgtgaaaagccacggtttgaataagtaattaaacgtttaatgccttcgaggccctctaaagactcttcgaccttaatggttataccttcttctacctcttgtggcgcagccccagggtagacagcttgaatactgatccagttactttcaaactgtgggaacatttgcttacgcaccgacattgctgtcaataagccgcccactaaaatgaagatcataagtaggtttgcagcaactgggttgcgagcaaaccaggcaataagccctttttctctgtgcgtggtcatggcttattcctcttttaacgctaactgcgttgttggcacacttagttttgcattatctagcttgactgccatgccttcagttgggtattcaagagcagaggtaataagttgttcaccattagcaaggccattatcggcgattaccatgccattttgttcgcgcactatgttaagtgttttaaaagtaagggtttctccatcttgtaaaacggctactttattgtctttaactaagtgatgcggaacaacaattgcgttgtctaatgcacggccttcaatggtggcattaatgtacgagccaaaacgcagaggttgcttttgctcataaggcgttgctacttgtgctactaggtaattcatacggctgcgttggtcaacaaccccttcgctacgaacaatagtcgcttgccacgttgtttgtttacctgcaaattcagcgttaattgatacgttagcaccaataccttgattgtttaggtattgtaggtctttatctgcaacaggtaagcgaatttcagccagtgatgttgagcttaggctaccaaagctattgcctgggtttactacactgcctaaactaattagtcgctcgtcaataatcgcatcgtatggcgctttaatgtaagtgcgctctaggttgcgtttggcgcgtttaacactggcttgtgctgcacggtagtttgcaagtttttccgcaagttgaggtttacgtaaataaagctcagaagggataacttggtttgagtcacctttgatgcggtcccactcagcttgtgcaacagagacttgtgcgcgttcaatttcaagagcagagcttgcttgcgctagacctgcttctgcttcaatgagtgccgcttcgtaatcatttgggtcaatacgtgctagaatgtcgccttgcttaacaaatccaccttgtacaaattgatctgataacgacacaacctgaccactcacttgcgcaacaagttcagtttggtttttaggtttaacaataccgtatgattttacatcgagtgttacagcatcaaaacttaaaggtttaattgatacaagcggacgcgtatcttgttctggtttttctgctggcggctgcttcattgaagcaaatgcgaatgccattcctagtccgccgactaatacggcgattgggagaatgatttgttttttactagccacgggatagtccctcacggttgacggtaattaaaaataaatttgataggctaagcatacgcaataaagtgtttacaaggcgtttgaagatgtaacaaaccattacacatattacaaaggcactaaaaagattctataagaggtacttaatgacaaataaaatggcatgtagattaggctgtggcgcctgttgtattgcacccagtattagctcaccgatcccaggaatgcccaacggcaaagcggcgggagagcgctgtattcaacttgatgataataacctatgtaaattatttggtgatgaatcaaggcctaaggtgtgtagtgacttttctgccactattgatgtgtgtggcaccactaacgaacaagcgctttatttaattactgaacttgagcaaatgacataatatatacctattcctcaacatactaagtcttgttaccttaattaaacggtaggaatatgttattgaggaacaaaatgacaaaagccgaaaaggatttgtatttatggagtcgatattttaggtggtgtttaaaagctctaccatggatgatattaggaggatttcctttacaggcatcttttacatggcattctttatcacttgatccaaccaatctgattaactgggtggagtttagagatgttttttcattaccaatcaattttgcagcggctgcaatagcaattactactttagttggtctttatcaccgctctttacaattggctgtgcagttagaaaaagttgagcaacagttgattatttcaaataatcagttcaaaaagtctgaacaacaatttttactctctcaaaatcaacttaaaatagctcaggaacagtacaaactaaatcaaaagaaagagagctttgcgctttttgtagaacataaaaagtacataaaaaatgttttcgaagaaatatttgaaaaatataagctaagtaaaaatgaagataatatatttcaattgagtgtatttcatgacgttttatataaatctttattcccttcaaactccactaatgaaattttagatttagatatagaatcaaactcttttaaattaaaagaaaatttgaaagctctaaatacggttttactttatattgataaagaaaagggaaatattaagcctggaatttttattgatgctatactttcaaacttaggttattttgggattgcctttaacactggcgtaataaaaaaatattatcaaacatatgatgatttagatagttttgggctgtatttgttttttgatgagttggcaacagtgactctttgtttcataaaggtttcaaaatctaaagctatcgcgcgtaaaaatagagcgcaatgctcagagttatctcaatattactattcgaaatatcaacaagagcttcagaagtaagttttcatttataacacttttgaattgaatggtattaatactcgccaccgccgggagaaagggtttctaaataaataattataattgctctttcatctttatgagtttaacgttaaaaaatgacattagtttaaaggattaaataatggtcaattgtatttcagcttttctatgctttatctgtttttttttgcctattacatgtaattcttcatctatagagacagtaacagttgatgtaactatgggctatgaaaatggctattatggggactcaatagatgattcagaaagtctttttgatgatatgctcgttttcatcaatggcaactttataggtgaaatggttgatacggttaatattacactcaatgttgacccaactatagaaaatagaatttcgttaattggcagggtgtcttcatttggtgaggtgactttaactgaagagaactaccaaactaattcagtgtatattccccttaatgaaaatcatggttatgctgagtgggcaaatatgtctgtctccagtattacagaaaatatgatagataaaaacttctcgagttttgacatttcgttctcacataataaattaccgatagatatagatgaaaatccctcttttatcattaatttggccagagctgacggtagagaaataaatctagaaaaacaatcatctgttgatatatcacattatttccatgttgtggatggcatacttacacctaagtctttcgaggagtttaaatcattttttagttcaagggctatatttggcgaactcactttaatggtttctgctagaggtaaaaaagtggacgttgattattttggagaagttaatttctatttggatacttataggttagatggaaaactgaccgctccaacttcaaatagtaatgttgcagttggtaatgttgaaatcaccttctcttattttttaaatagaaaaaagctgtttaaaaaagtagttaccgatgaatatgacttttttagtataaaattaccccacgctaatttgtcatttttagctaagaatttttatgaaaatacagagtatattttaaaagagaaatctccgctgagcagtcacgcagtaacattaattttaaccttatgaccgcgggcgataaaaatgtcaaggcttcaaattacccgaagggtaagatagttattaaaaagccttctatatatgaaccaagctattaccatttgcttaatagtaatcgaagaagtcattttatagatgcttgtagaatgaagaatcatgatcatggatatatttttaagtgtgtggatatcatccagccttaactctatgctaacggccgccaaactcagagattaagtgagcttgttatcagcttatatgcattcttcatagagtaacaatttttggaatattaattgtgatacctaattctaaaatactaataaaaaatgtttcggagattgaaacttatgatgtcattgcatcggaatcgagcctaaatgtagccccttacgaacaagttctaaaagattattggcatgaggttatagcggatgcgcaaagcgcaggtactgaaatttgggatgggcagtattatcgattagaaaatatcgatgaaatacaacgtggttcattgcaattaaagctgagcactatctcatactctacaattcgctctttaatgaaattaagcaaacagcagagcctagcgagttgctactttccataccatataaatacaggggcgttaatttcgacaagtgatgacttgtttgtgtttggtcaaaaatcaacaaagtcagacacttattttcttgaccttattggcggtggccttcaaagggatgagttagaagtaatgcaggccgatgatattaaaaagaacatactaaaagaagcatttgaagaagcgaatatatcgagctcaatgattgattgggtaaaccttaattcatttcttctaactaatacgatgagtgtcgttatagtttttaatatcaaactaaatgtagataaaggccagttgataaaatcattcgaagctcgagttgaaaatgagctttcaggcttacaattttttgatcaacaaagtgtgaatgaatttagccacaaagaaaatatcctttcttatttgagcttagtacctcagcttgtgagtaatttttagctagataatattatttatgaatagtaataatgccagtcaattgactggcattgttgtttttgcttaccacgtataggtagcacttagcgtatattgttcgccgcgacctggggtacccggtacttcttcgaatgattcatcccaaatattgtcagctgcaaaggtaacaaacacattatcaaactgggctggggtgaattttagcgttaactgtgtaaagaaggcttcatcatcagagctacgaaggcggttactgtgttgtttacgccattcgttatcgatacgtagctcaagcacatccatcggttgccatactgcacccagtgtcacacggtgatcagggtagttcagcgcataaaagctcgcatcaatatctgccgtaccatagtcttctgacttttctaaaaaggtgtagctggcaatcaactcagtactttcaaatgatttattcgctaaaaactcaacacctaaggtgtctatatcaaccgggtttgcaaaacgagctgaggttgcatcaaagcgatatgtccaatcggtaaggtttttatctttgcggtagaaaatagctgaatctaaacgccacgaagactgttcaatcaataaacctagttcaaggttatcggtggtttcgcgctcaaggctgtagttacttctgaataatccgctcgtttcactgccgccaattgctgtatagccaggaacttgtgttgcttcggcgtatgatgcataccaggtatgttcactgccattttgatgagctactttcagacttgcatcggcaataaatgaggtagctgagctatcacggtttgtatcatcaaatgcagcaccaacacgtacagtaaactctttgttcgctgcaagggccgccttgtactcaggtaagatactgagcttagtgtaattgcgtgacgtaaagttgttttcaagagacgttgattcaatttcatcagcaataaattgccctgcataattaatagcatagcggttatttaagcggtgacgcccagagagtgccaatgacttaaccgtggtttcgtgaaacgcttcaaaaatagctgggttttcacgagataatacataatggtcgttatgtttgcgataataaccagtcacttcaaggctattgcccttaccataaatttgcttgtgattgagcatgaaaagcttggtttcaagatcttcggtttcgttaaaattaaatggtgtgtaaaggtttggccaaccaaaaaacttctcttggcgtccaaacataaaatcagtttgcgaggtagagcttgcaagttgaatacgcgctgaggcacgttcaaagtcgtggtcgccattctcaattgagccatcgctttttgagtgcgagtagtcaccctcaaaacctaatcgccaatctggtttactatccagcttttggctatgggcagcatgaatgctttgtaaattaaagccattcgtacctgtgccaagtgaaacgctgccagtgcttgtgatagggcgccagccaaatgaaaccgtaccaactgagctattcataccgtaaagagcattatcagcaccagtaagcactgaagggcctgttagcatttgtggtgcaatcggaatttcagcaaagtagtgaccagattgagggtcgaataacgtactgctaccaacacgaaagccggtattttcaaagataccaccacgaatggttacatcagcttgtgcttcagccatattgcgcgattgcaaatcgacacgtgggtcatattctaaatttgataccggcgcatcaaaagtacctacaggttctttatttgcggttgctgaaacttcaacggtgatttgttcaatattgttggtgtcttctgctagcactgagcaagtgacgaataaagcgggaagtgtaagctgtactgcgcgtaccatctaaaactctcttgattttgtttaatctggggtagtgggctagttaggcgcactgaaaattgcgggtattgtatctgaatcactgagttataccactccaaccagatttcagcaggcaataaaaaaccgcgctaattgcgcggccttttaactaaaacagtgtttagttttgattaatagattgcggtgggaagttacttagaatgttagcaacggtttcattgataacttcagtgcgcttttcaggtgattgattcttttgcaaacgaccttctttagcaccacgccaaactaactggttagaagcacggtcaactacgtctaaaattaatgtacccacttcgtattcgcgagtcgttgtttgcgtgttataacccatgccccagtaattccagcgtgcaccgtaaccaacgttaaaggtatcaacatcaatttttgtatcaactgaggcatgatagttaatcagtacatctgcttgtgctaaatcaactagcttcataccgcttttttcaagttcagcattaacagcttcacgaacgcgtttttccattaaaggactaatttggtagttcgctacgtttttagttaagctcgcattaggtacccaagagaaggttttataattactaaaatctgctgatttgtcgtaatcccagtcaggcgttttagcacaggccgctaaaaataatacagccgtcgcgattaataagttcttcatattgtttgctccttggcaaatttccactacttgattgataacataacataaaaataattcaacggaatgattatttaaaaactatggcacatttacaaaaaagtactgtaatagtttgtaataaatacccaaaccacctcaagatgcgagtttcagttggaattaaaagcgatttaggcaaggcattgattgcaagtaatagtggtactattgttaaaatcaataacgcagtataaatcgcttttaaaccaaccctttgggcgcttcacaggcacttactctcatcgttgttacttcttaaaagggattgccattgttgcaaagtaacgccttgatattaaacacctgtgaaacgctgaattctgcatcttgaggtggcttgggtataattatccttgactgaatcaatgattaattttcggattgaatgctgtgtttgagctctatctagctctttcgtcctgaaagttttgcgaattatttatagttattttgacttataaagcacgatgtaggagaaaaaggtgaacttttcaaacgacaataaaaaaccgtgctaggcgcacggtttttcaactaaaacagaatttaggtgttatcagttttttgtggtgggaagctactaagaatatctgcaactgtatctacgattgcgtcagtgcgctcttgtggtgactgtttcttttttaaacgaccttctttagctccacgccaaacaagttgatttgatgatttgtcaacaacatctaaaatcaatgtgccaacatcatattcattcgtaacagtatacgtgttgtggccaacaccccaatagttataccccatgttcattgtttgaacattaattttggtatcaaccgaggcatggtagtttaaaagtacatcagcttgtgccatatcaactaacttcatgccatttttttcaagctgagcatttacggcctcacgcacacgtttttccgttaaagggctaatttgatagtttactacgttttcagttaggctcgcattaggtacccatgagaaggttttataattactaaaatctgctgatttgtcgtaatccaaactaggtgtcttagcacaggccgctaaaagtaaaactgttgatgcaattaataagtttttcatcttgattgctccttggcaaaatttccatcatttaaattaataacataaaatagtaataattcaactaaatgatttacggtaaatttacaaaagagtcagtaatagtttgtaatcaatacccaaaccatctcaaggtgcgagtttcagttgggattaaaagcgatttaggcaaggcattgattgcaagtaatagtggttctattgttaaaatcaataacgcagtataaatcgcttttaaagcaaccctttgggcgcttctcaggcacttactctcatcgttgttacttcttaaaagggactgccattgttgcaaagtaacgccttgatattaagcacctgtgaaacgctgaatgctgcatcttgaggtggcttgggtataaccatccttgattaaagcaatgattaatttttgcaattaagcactgtgttcaacttctatccagtctttttcatcaacccagttttgcgcaccatctttcactgtacgaattgggacgatgtaatcacagctgacttgtggtttaactgaggcaaaaatcggcacaaagccaaagctaagagcggtttcgataattgctttttggttttgtgggtcgatatcagctgcttcatcgatataaatcggaatacgatacaggttttgctcttgatcacttaataaataacgaataaacagcatgccacaaagtagcttaatggtgatacgagtaccgttagagccggctgagtctattttttcgaagtgttcagtttcgccagcacgatttactacttcaaaacgaatatcaaataagtcggtcagtgttaaacctgctttttctgaggcaagtttaattaaatgatctttcgcttcgtttaccgcagactcgctataaggctcttgacttaataggtctagagtatcgccttgctcaaactggtttgaggtactgataatggtatcaatgctatcaactaacatcttgcgcggaataacattaattttgaatgcttgaaggttagagatccgatgctgactaatgcctttattaaagctgttcatttcgcggcgtaggcggtctaagtcttcacgcaatcctttaatggtggcggctacttcggttaacgcaactcggccttgacgctcaacagcatcgcgctcgttatcaatgttatgaaacgcgctaataagcttttcgtatttagtaaactcatcgttttcgttatcaaacttagtaatacccgcattataaatatgcatgtaggtgttacgtacgttgatatcaaagttgcgtagttcttggcagtctttgttaaagtgatgaatgaggtcgcttaaattatcaaaatcaatactgatttcaatcatgtatggagtcactttacctgagtaaacatcaagggtgtgatcgatacgttcagatttaacttggcgtaaacggtcagcttggcgggcaagcagatcttttttcgacttgataattgaacgacggtcgctgattgagccactgttcttttgaatgtcttgcaggtagtcgtcaacttggtcgcgctctgcatttaattgctcttttagcatggtttgtgcatcgacagattgctgcatcacttcaaattgttcaaagcgttttaatgcttcttctgaggccattagctcatcatataaggcatctttttctttttgcttttcggcgacattagcagcgacttcgcgctgttgtttaaattcttttagtgagttttctagggcagcgagttgcgcggttaattgctctttattttcgcccgtttgcatttgcactgggcttagctttttaagtttaatcgtcgcgccaggaagagtcagtacaccgcctttcacatttgccgataactgctctaagaactcaccaaaggcatcttcgtctgtgatctcaacatcaccattgctggtggtggcaaacgataagatatctgggttcagaatacgcgaaatctcttcaacttcttttaaagataaatcttcacgcatacgggtgaataaattgaactcgaggttctttaactgcagttttaagctcttaatttgcttttgtgtttcgctaatgcggtaatcaagggtgtgtaagctttgaccttgggcactgcttaatgaatgcgatagcgattcataatcttgcttaagttgcgtaaggcttacttttaaagtggctttattcaccaattcaaactcagatttaagcgctcgatagtctaaaaaccattgttcaatttgtgtttgtttacgttcaatatcacgtgattgctggatataaagctgctgcttttgttcgaactcatgcttttcgtgttcgatatcttcaagggcaatatttagctcagatagttgctcttgttgataggtttcaaagtcaatcagtgcttggtcaatttttggcgcataggcagcaagcttaccttttaaaaccgtttggttttcaagcatagactcaagagctgcgataggctcttgcattgactcaagggcttttagttcacgtttagcgcgattcactttatcgaatgaacgtcgccaaacttcataaaagtcgacccgtgagtttgacatatgacgctcaaatacacgtagcataaagcgcttaacatcactggcacctaacttatgcaagttaagaatacggcggaaaatttctttgtaaatcgctgagtcttgcacgttattgagggggatcatctttaagttgatatcgccatcaaacggcgttgcgccgccagtgagtagggcgtttagctcttgcgcttttaattcgattggattgaaaccttgctcttttaagtgattaaaaagcttggtgaattttacaatagttttgccttgagtgtagtgatcaaggttcaacttaccttggtagcaaaaaaactgatgcgcatatccggcaattttaccaaggccagcaacaccaatcaccacaggaccattaggtaagtcagcttcaagtaaaatataggattgatctgacgaaaagtagaattttcgggtttcgtctaagtcgtggccatcccattctgttaaacgtaaatcattaatcagtggaaattgcagggcattaatcaccgagcttttaccggtattatttggtgcacagattgagctacttttatccagcgggatcacgcattttgcatagcctgcggtatttaaaagcgcaagtttgctgagtccgtaaaggctttggctttgcattattcgtcatctcctaggtaggtttcttcgtttacttccattaatgcatcgatataacgataaattggcgcttgcagcataaagccgttttctacttcgcgcgcaagacctaaacgtaccattcgcaggtaaacgtctttgcgtaaatctgagcctgagaagatttctaattgatcaaacaggtgcttgttgatttgcactaaggtttgcatcagttctaggtcgtttacttcatcaaacaaggcacgcattggatctttacccgtattggcatagtgctcaatcaagatgtagatagtcagtgcaatggcacgcgaaattttacccatgtttggggtgctttcgtcgctgccaaaatagtaaaagccacggctatcgtgttgtaggtcatggccaagggcgttaaataacgcgcgataagcatcaatgtgttggtcaagctcttgccacataagcgtgtcttgctcactaatgtggtagcctgatgtgagctttttattaatagcttgcagatgcgttaaatcatctaaattaatatctgtcatggttgttgctctgttgcttttttatcgtcagcaatcgatgagttaaatgggtaaagagagaagtgttgctgggcaatttttatttttactttctcttggctttggctaatctcaaggtcgccatcgctaattagtttttgatacaagaacagcatttcgtcagcctcaagatctgggtagctttcatctaaaaaactaaggagtggctgagcttttttgctggcttttttaaagcgttttttaaattgggttttaacatcgttgtaatcaggtatatgcggactttggtacgcaggtacatcatcctgttcaggaagctgatattcatcgtgctcaaagtcaactaagcctgccatataggccacgatatgacgttgctgaccaagtgaaaaacgctgtgcgtcggagacaaagttaggctgtaccgcacttaacatgttatcgacgccatttttacgcactaaaccaagcactttagccgcttggcgagtaattaggttattgcggcgtaattcttcacgcagcggcatcagcatatcggcgcttttacgtaagctttcacgaccaactaaatgcatttctaaaatacgggtacgtaattgttcaagcatgcgcttgtcttggtatgacttaccaaggcggtcaatttgctctatttgcgtgctaatttgcgattcgatggtatgaaagcaagcatgaaaatcaccacgaatatcaaccatctcaagcataggttcaatgtattcatcgaacgcttcaatgactgcttgatagcgcttttgcaaagattgcactgcgttgttagctttggcttgctcaacaatatttaaaattgcgttttcattatgggcaaacaatttcattattttgcgaacccgatcatccataatgcggctaaagcggcgtagctcgtcgtaatcttcaatttcacccgctttagcaaggcggttaccaaggcgagcaaggtcatcaacgagtacactaatttcttgggcaagacctagatgctcttcttgtagcaagaaagttgcaaaatcggcgatcgcgcggttgatttctaactgcgatgacttagccagtgggataatgatgtcttgattcaataaacgatttgtttctttataaatgcgttcatttgaccaagtgggttgtttttgttttatcgcattttgtacgtctttcaagctgaaatcagccattttaaaacgtttaaataatagttctaacaccccccaatgctctgtaagggtatttaataactttttagctgggatcataaggctccagtaaattcagactttggtgttagcgattagtagtaaattatgtaattgagaatagttttatgctgtcgatgctgctagaatccgcgccgaaacactcgtcttacaatttttacattattataaaggttgttcaaacaccatggtaaccccacttatcctaaccctgatagcggtggcatttttgcttatcgttatagaggatattatccatgttaacaaggccaaaacgacgcttttttttggtactttatgctggattatcttatttatctctccgattcatgggcaaagcccagaaaccatacaacatcaactggatcacaatatattagaaatcgcgactttgtggctatttttaatggctgcgatgacctttgtagcgtatttaaactctaaaggctttatccagaatattgtgcataaaattatgccaaatcaaatcagtgaacgaaagctgatgtttttgattggtggttttgcgtttttattttcatcgatatcagacaacataaccgcaactttaatctcgcttgcggtagtgatgtcactgaagttagatcctaaaaaattaataaaatacgcaaccttaattgtattcagtgttaactcgggtggggtgtcgttgatcacgggtgatgttacaacgctaatgattttcttagacgaaaaagtcaccattgctaacttgttattattaattgtacctgcacttgcaagtgttgcattgttagcggcaatgttatcggtgggtatgtcgggtaatgtggtatttgaaaagcaaacggctcgtcgtattgaaaaaaccgatattaccattgcggttatcttcttctcgaccatcatagccacgttaactttaagcgtactttatagtgtgccaccgctattaacctttttatttggtttatcactgatgtttttggttgcgcaatttttaatgcgcaaaaaagatgtgaacaaaaaaatcatcgattatattcgtgaaattgagtacgacaccttattgttcttcgtgggtgtgttattgctggtgggtgcattaaaagaagttggcatgcttgctaaatttactcacctttatgaattgatggcgcctgaatatgccaattacttaatggggctattatcggcggcggtagataacgtacctttaactgcagcactcttaaaagcagatattgtgatgagtccacagcaatggctatcgtttacttacgcaactggggtaggtggctcaatgcttattatcggttctgcggcgggtattatcgctatgagtaaagtaaaagcgcttacatttatgagttacctaagaatgtcggtgtatttattgatttcatacaccgtaggttattacggttcgcacttagcgggcagtttaatttcataaaacaacttgacagctagacgtctaaacgttaactttcgaagcctgcttttaacagcaggctttgttattttaaccaggtgttaacttaacattcagaagaggtgcgatacttaggtatttaatgtgaggtgacgaacgccgatgatcattaatgagggaagtactcgccgagaaaattagccggacgtcacggttatttttcggtttatggggctgaatcctcaaaactgtcaccaaactaggtggagagcttctggcatggactactctttattttcaaagcacccccttgccgagttcttcttgatttactgtggatagttttccacaaaaggagacgacatgaatacccaattagccgccaatacaaaatcagattacgttgttgcaaaatttggcggtaccagtgtagctaactttgatgctatgagccgctgcgcagaaatcgtttgtgctgataaccaagtacgtattgttgctgtgagtgccagtgctggcgtgacaaaccatttagttgcattgtgtaaacgtgatttgagcgcggttgagcgtgatgagcacattaccggcgtagtcgccattcaagaagcaattttggcagagctgtcgctcgatgctgatttagcacatggctttaatgaaacgcttaaggcttttcaaactttggcatcagaaggggttaagtcagtagctgagcaagatgagctactgagctttggtgagcgtttatcatcgtatttgttcactcaagtattacgtggtcaaggtcttgatgcggtgcgttttgatgtacgtaaggtgctaaaaacagatagccaatttgctaaagcaacacctaatgttgcagcaaccgctgcggctgctaaagagcatttagtgccgctacttgatgagcaagttgttgtaactcaaggctttattggtagcaatgaacataatcaaacaacgactttagggcgtggtggttcagattacagtgctgcattactcgctgaagcaattaacgcaaaaagcgtgcatatttggaccgatgttgtgggtattttcagtactgatccgcgtttatgcgccaaagcaagcccaattgctcgcttaagctttgatgaagcggcagaaatggccacgtttggagcaaaagtgctgcatcctgcaactatcttaccagcgagccgtagccatattagtgtgtttgttggttcaagccgtgagccgcaattaggcggtacatggattgaaaaagaaaagtctcagcaaccgggtattcgtgcagtaacgcagcgtaaaaaccaaattctattaaccgttaaaagcccagaaatgctccttgcgagtggtttcttagcgcgtgtattcaccattttaagtgagtttaatatttcggttgatttggttactacctcagagatcagtgttgcaattactttagataacgcgccaaatgcatcacgccctgagcttgatcaagcctgtttagataagctttctgagttttgtcatgtgtcggttgagaacaacttgacgctggtggctttaattggttctgaaattcaattacgtcagcaagaaatgaacttaatgcaggtattaagtgactttaatattcgtttaatttgccacggtgcaagtaaacataacctgtgcttcttagttgagcaaagcgagtcagatgaagtcgtgcaggctattcatagccgactattagaaagccaagtcgcggcgtaagtcgttaaagttaataaaagagcactgccagtcagtgcttttttgtgccacaacacttatatcaaagccttcaatagagttactattcgcgctgaaattatgtttgctcaattcttcaaatacattaggagcaagtagtttcgcaattggctgtgcacttgctttggcaagcgcttcttttaatgtccagattctaaaaaagcactgtgcctgttcatcgggagtgtcaaaacggctaattaagtcaacttcatcttgatgataaaaatgctttgcaagtttgataaaagggcgtggcttgctgctttgttcaatatcaaaaccaaatagctgctgttctgggttaagagctgcaccgattaaaccatttgaatgagataaacaggtccacacaggttctctaaccggggtatgtagctttagcttgctgtctttgtcatcaaactggctcgatatttcattgagggctaaatcatcatgagggtatgcatgttgatacaaatactttaacgttaagcgagtcgctaagtactcttgctttgcactaggaactttgcgtttttcaagcacacttaactcaaactcactgagtaatttatcaatgggtaaacttgcaacatcaatacgtgttgcatccataagcataatttttttggccgtggtttggcactgctgttcaataataagggtgttcgaaaagtagtgactgctcatggtttaacgcttacacagggcttgaatttagttttgtttgtttttacagcaaatgcacttatatgggcactaacaaacgcaaatagtttacgcagttggctgtaattatggtttaatgaggaaaaataataacagatttgtagatgtatggcacaagttcgtgacggctttcaaagccgattaggtttcgttttagccgcttctggtgcggcggtaggtttaggtaatatttggggctttccaacacaagcggcaaaccatggcggcggtgcattcttacttgtttattttattgttattttcttattagcgcttccggctctttatactgagctatatttaggtcatcaagcacaagctaatccggtaaaagcattatcaaattcatggcaagatacagcgcctaaagtaggcgctgcagcaggctatattggcttgtttggtgcgattgtaatgctaagcttttattcgatagttgcagggtggatgctcgcttatgcgcttgagccactcgcaagcttctttggttttactgagttaagtaactttttacacagtgactcgatggcacgtaattttgtgtttacaccactgatgcttattcttactgcgagtattattttaaaaggcgttaaatcaggtatcgagacttggtcacgtcgcttaatgccattattgctagtattattagtggcgttaattgcttatattgggaccctagatggtgcgatggatggttttgcagcctacttagtgccagattttagtcaaattcttgatgcaaacttaattattgcggcaatggggcaagcgttcttttcattgtcgttaggtgttggttgtatgatggtttacggctcttatttaaaaccagatgccaacctgcctaaattaactggaaccgtggcactactggataccggtgtggcctttttagcaggtttattgattattccggctatttttgttgctcagcataacggtgtagaggtatttagcggtggtaaattggtcggtgaaggtcagttaatatttgcaattttacctgaactgtttagcactatgggccaagtgggtttactcgttggcttattattctttgtattaatgtcgattgcctcagtgacatcaaccatctcatcgaccgaaattccagtggcatttttagttgagaatcacagtattgagcgcaaaaaagcgaccttatttgtgacgctaatcgtctttattgcttcatcactaatcatcttaaactttgactggttatttggcttagtgattatggtgcttacacagtaccaattacctttaatgggactgttctatttcattactgttggctggttatggcagcgtggtaataaattgcatcaagtatcgagcggccctcattattggtttgcccagtacattcgctttgtctgtccgctattaatgacggcggtatttgtgaacgtggcgttgttgaaatagaaacttgagttacaagtctctagtttcaagggaaaagacaaaagtaaaaggcgtagggtttaaacctcacgccttttttaatttaaggtgcgcttgctttaagtaacttcattagttaatggtaaaccttggcttatttcattggcgctttgcaatgtagtgcaggctatttcgctaagtgcttcttgggtgaagaagccttggtggcctgtgactaacacattcggaaagctaataaggcgtgaaaaaatatcgtcttgcatgatttcttcacggtgatctttaaagaataactctgactcttgctcatacacatcaagccctaagtgtccgagctttttagacttaagcgcttgaatacaggcttgagtatcgagaagtgcaccacgagaggtgttaatcagcatgacaccgtctttcatcttcttaaatgcgctagcatcaattaaatgatgggtatgctcgttgagcgggcagtgcaatgagatgacatcactttgggtaagcaatgtgtctaaatcgcacagggtataagggccttcaccagccattgggtcacaaacgagtaccttagctccaaagccatttaagatatttaccagtgctaggccgattttgccacagcctataatcccgatggtttttttgaataagttaaagcctagcaagccgtttaaatcaaagttaccttcacgtactcggttaaaggctttatgggtttttcggttgagcgttagcataagggcaatacaatgctctgctactgcttctgggctatatgcaggcacgcggcaaaccttgatgttatgctctttggcagcatcaaggtctacattattgaagcctgcacagcgtaataagattgctttaatgccaacagccgccatatctgcaatgacgtgtttgtcgaccgtatcgtttacaaacacgcacactgcatcaaaaccttggcagaggggcgtggtattgctgtttaaggattgctcaaaataactgagcgaaacagactcagcgtattcagttagattcctttcaaaaaacggttgctcatacttttgcgcactgaataaggccagtttcatcatttaaattactctctatcaccattttgagggtttcgggtttggtgcgcggggcatatcgcgcaacgagttgaccctctgagtttataagaaatttggtgaaattccatttaattgcgcggttttgcgcaattcctcgggtatggcactttaaataattaaataaaggatgggcgtctgggccgttgactaacaccttgttaaaaataggaaagctgacatcaaagtgttgctgataaaaggctttaagctcattgccatcaagtggctcattgtggccaaattgattacaggcaaaacccagtacggtaaaaccttgctgtttatattcttgatacaacttttcaaggcttgccatttgcactgaaaaattacatttgctggcaatattgacgataagcgctgtttttccttgtaacgattcaaggctaaagttttcaccagatgcaagctgggcattgaaacgatatatactatccatgttttacctgtgtgtttttaaacggtttaaatgaactttttttcattcgctttttagttattcggttgagataatgaaattgttactaatttatcactcaaataggtcagttttatgtcaatgaaagtcgccttcatcggattaggtgtaatgggttacccaatggcgggtcaccttgccaacgcaggtcacagtgtgacagtttacaaccgcacaacggctaaagcgcaaaagtgggtatcagaatatcaaggtgaatacgctgaaacgccaagtgaagccgcaaaaggggctgatatcgttttcatgtgtgtaggcaatgatgatgatttacgctcagttgtttatggtgaaaatggtgtgctagcaagcatgcatgagggcagctatttagttgaccacactacaacatcagctgaagtggcacgtgaagttggcgctcaagcaaaattacaaggcatcgcatttttagatgcgccggtttctggcggccaagcgggtgcagaaaatggtgtattaactgtgatggttggtggcgacgaagctgactttaatgttgttcaacctgtcatggctgcttttagccgttttagccagttattaggtgaagtaggttctggtcaactttgtaaaatggtaaatcaaatttgtattgctggtgtggtacaaggcttggctgagggtttacactttgcaaaacaagcgggccttgatggtgaaaaagtgattgaaaccatctcgaaaggtgcagctggctcatggcagatggaaaaccgctacaagacaatgtgggctggtgaatacgaatttggttttgctgttgattggatgcgtaaagatttaggcatcgctttggatgaggcaaaggcaaacggcgcaactttgccgatgacggcaacagttgatcaatattacgccgatgtacaagctttaggtggcggccgctacgacacctcaagtttattagcgcgtattgaagcgctacataaaaagtaatattcataaaaaacgcgacaattattgtcgcgttttttattacatgctttgtgcataattgtataacgcttttaaaatatgcagatttttttcgttatcatcattttcatgagccagattctcaagggtgatcatgaaatcttggccactgattgaagggttatcttcgccatgcattagcttgttttggcaatactggcgccattttgctagctcgtcttggctaagtgtgtgtggccagtttcgagctcggtatctgaataacaaagtagcaaactttttatcatcaaaatcaagctgcattgaggctaattgctcagggcttgcatctcgtattatggcaaatttagctttatcagcatggctggtaaaaccatcataaagttgatagtcagggttggtggtttcgccgtaatcacgctgttcgttaaatacttcggttactttgtcgcgaagttctgtgttggcttttaaaatagcgagattttgtaagcatttttcgcggtcaatacctaatcgctccgcgttctctggtaacaaggtttttgctggcgcaagaatagggcacttatttaaatgcactagtttaaggcctactggtgcttcgtcttcgccaagatcgctgtgttttgtataaaggcgcgtgcgtagctcttcaacagataaatctaataagacttgcggatcttcagttaaattaaagcaaataatggcgtttttattaactggatgaaagctcattggtgcaatccagctggtgcagccttgatttgctggaattcgtgatgaagtgtgcactagtggtgtcatgttaaacacatcaactaaatctgccagtgcttttttagaacgtaagctaaagaaaaactgatacaactttggttgtttttctttaattaatttagccagtgctatagttgccgttacatcacttaaagcatcgtgagcggcagcatgttcaatgccattggcaacggttaagtgttcgagtttaaagcttggtgtaccgtcttctttaagcggccactcaatgccttctgggcgcagtgcataacaggcgcgcactaaatcaataatatcccagcggctattattgtttttgtattcacgctcgtatgggtcataaaagttacggtataagctgtaacgtgtgacttcatcatcaaaacggatgctgttatagcccgcaacacaggtgttaggttggctaaattcagcatggatttttgccataaactcagcttcaactaagcctttttgcatcgcaacttgcggggtaatacctgttattaaacatgcttcagggtggggtaagtagtcagccgccggcttgcaatactcaattaacggttcaccaataatatttaaatcaagatcggtacgaatgccagcaaactgacttggacgatctttttgcggacttgcgccaaatgtttcgtagtcgtgccagtaaattgttggttgttgttgttctggataagccatgcattaaaccttgctaagcgtcgagccgttttgagttgttttctgaattgtcagaattatggcatagagcctagctagtttatagagtaaaacgtaatgtggctgtttagtgtaacttttataaacacgagctgtataaaaaatggccttgcggttaatttttatgcttatatagtgaggtgtcgttagtttttgagctgttttgtattctgtggctcggtatttgctaacgaaaactatctttaacaatgaaggaacaaaaaaatgactttatcagctttattactatctactttagcattcgacgcaactccagcttcaagctttgatacgacaaaattacaaggaacaggtggtataattattttgaacccaaaaaagaaaaatcaagaattacagggaacaggtggaataattatccttaatccaaagaaaaaagaaaattaacataatgtaaagaaaaccagccaagagctggttttttttaagcgataagattatgattatgaacatctttaataggatgattcatgcaatatttagtcgatttatataatgaaatgcttgtagcaacatctgttcacacagtgttttcagtgcaggtaattattgcaatttgttatgcaatagcattagtcctatctctttatagagcacttagaaatagagagctatttagtgacttcttatcaatagctgtcgtggtttttaaatatcaaatcacatctcttttgatggaaaaagtattgatatatgttcaaaatacaggtgaaagtggaattgctcaaaatgtttacttgagtattgctggtatcaatcttttaagtttatatattttatacaaattacatcagaggtttagttataaatatggagaactgttttttagtgtatttaagctaacgatagttgtaacaatcgctcacttaattgtgtggtttaaatttgtaatacttaatgttcaagaagaacacgcctacatacattacatttacagcttcatcgtactgtacatcagttttacccttgctatcgtaatgttatttcctggactacttaaaacaaaattaaagcttttactgagcccaagctggccatttcatacaaaaatttaacacggattattcgaaatatatcagttccatactattaatattaatgctttttcctgatgttttgcgcactaagtttgggtgtatagtaacatttagtttaccgagggatcgtcatgcttgaactaatttacatagccattgttgtattagcagttttgctagctgtaagcacgtggctgatagcacgcaaaaatatttttgaagaacaaatcagaagcaaatctgttgaggtggtgtggtgtacgctacaggcagagcaagaaacggatatcaacaaagccataaaactgtttaatagagcggaggctctgaaaaacgaaatatgtagcctgatggataacagtacaagccttcaaaagtttcagtgggtagaagcaactgatcttaaaaaccagcaattaaaagagctatctttaggtgagttgcagaagtattacgatgaacaaaataatatttctgagatctacaacaagctctataaaggaaaaaattaaaagccagattattttatctggctttgtagttttagttcattttttatctgtttaacttgaatatcagctagttgtttgagtgcatcttgagtttggttttcacccttgattaaccccgctattgacatttttttgatactttttaaaagcccattattaattgcctgtaacaatgggccttctagtttaattaaattatctttcttaccacttagtagataatcaaaactaacctgagcgtgtttactcgctttatcaatcacttcatatgggacaatagcgctttgaatgcattctttgctatagccttgagtgagatctaaagcttgctcaagctcagtgttattggttacttggtatacttcgcataagcgttgaaaaattgcacttatatgttgctgctcagaatttaactcttgatcgaacatggcatatccttgcacattattttctactaatagtaaacgactttttctgaaaccgcattcataaagtgcacgtttatcaaatatttaatgccatatggtgatacaagccaataccaactaatacattaaatgggaaagttatgcccaaggaacagagcatagccaacccaatgtcagcctctgggatggctgctttgatggctgctggtgcggcaatatatgatgcacttgctactaagcttgccaaaataacaactgaaccaagttccagctgtaaaagggttccgacaccgactccaatcgcgccaagaatactaggagtaataagagcaaaaagtgctaagcgccagtgatgccatgggatagggcgtagtgtttgagctgccattaagcccatttcaagtaaaaacaaggccagtacgactttgaaactgttggttaataaactggttacttgactaccttgttgagtgccatacatcatgccgattatcacaccaccgactaacaagatgacgcttttgtttgttaatgtttcatgccacagtgctttaagtgataaatgtttacttgagctattaccaaggctgcgaaatagcagcagaccgacaataattgctggcagttctaacatgactagatacagtgttacttcagcgccaacatctaaagcatttgactcagcataagccaaagcaacagcaaatgtaccggcacttactgaaccatagtgtgctgcaatacttgaactatttgctactgataaaccaagcaatttatttaatataggataaacaagaagaggaatacctgcaccaagaagcatcaccgcgcccatttcaggcagtaatttccaatgcaagctgccgtgcagcaccatgccaccttttaaaccaattgttagcataagcagtaggctcagcgtttcgtaagttgcttgtggaattttaagatctgagcgcaataaccctgcagctagacccaaaataaaaaacattacaacaatatcaggcacttttttctcctttgaatttaaaatgtcgtcattttaaacaaaaagaagcatagtaaataattaaataaatgctagtatcttatagatttttatctatgggtggtggttatggatctaagacatatttcttttcggctattagaagtgtttatgcaagttgttaaaactcgttcgatcagtgaaacagcaaggcagttacatttaacacagccgacggtttctcaacaaattaagcgcttacaagaaagtattagtgaacctttaattattgttaatcagcaaaaaattcatattactgaagcgggtttcgcgctttatcaaacgtgcctacaagtatttggacaatttgatgattatcaagattatttagttgagcttagaggaggagagcgagggcgttgcaaaatagccattgtaaacactgcacaatatattttacctaagttactgggcccatacagtaatttacatcctcacgtagaattaccgctggaaattggtaatagggcagaagtacttgctcgatttgaaagaggagaagatgacatttatgtatttagtcacccgccgtcactagaacatgcaaaggctgggcgatttttgcaaaatccacttgtctttattgctcctatgcaccatccacttgctcagcaacagcaagtgactttaaaagagttaatgaaggagcgttttttattacgtgagcctggttctgcaactagaatgctatttgagagtgagctgcaaagtcgtggcttagtattgagtaatacagtgcagatggctagtaacgaagcgattagagtcgctgtaggctctggcatggggcttggtgtggtatcacgccatgtattgccaacaaacgatagctctttttgcatccttgatgtagttgatgttcagcttgctagtcactggtacttcgtggtgcgcactgatcgtcatctttctcatgctgctcgtagcttcttaaagttcgcagagcttaaccttgagcaatgtttagacaaaaactgggtcaataatgaattaagtacattgaatacaagcttagcgtaaagtatttttaaaaagccatagtaacgacttgatttctaccgtttacttttgctttgtaaagtcctttatctgcttgggcaagtaactcgtttatattattgcttcctgactgatgggtgattatgcccacgctgatggttaattttatgcgttgatcattgaaagtaaaatagtcgttattgatggctaagcgaattcgctctgataagttttcaccctgtaattggttagtgcttggaagtataactgcaaattcttctccaccaattcgagctactaagtcgtgttctctaagttgtgattttattttatttgcgacccactttaatgcctcatccccagtttcgtggccatacttgtcgtttactcttttgaaaaaatctatatcaatcatgactgcgcataattcactgaggctattgtttgcttgttccaaatagttattgctaatagttataaaagctcgtctattgagtaatccagttaatgaatctcgattagcaagatcactgagtacttgttctgattctaaaaacatgagtaatggccagatcattgctgtaagtgtagtgatgatgatatggctaattagaataatggcaaacacttgtgatatgtctgcctttatgtagttaaagtgctccatcactaaaagaccaaattgaacaaacatgatggcgctgtgaatgaaaatgcatagctgcaagagcaccaagtggataattcgctcaacatttagtctacgtaaagcattcgctgcgtagagaaaactaaaggcaagaattgcagtcgtgacgaattgatcaaaaccaagttgaaacatgggaaataatagcattgcagtagctagtagaagatataagcaacgttttaagtagtatttttctctattgttataggcatgaatacctaagactgcagctagtggagcggctattataagtaaattggctataaagtgtgtcaaaattggcaggtcaataaacacacgtgaggtggctgtaatttgggctaatacaaaaatcaggcacgaacttccccaatacaaatagctttgttgctgtctcaaaaaatacagagacaataagaaggcaccaataaccacattcagtaataccgaaatgctgattatggtgggtaagtccaccatgaatatccctaattccactttacgacataattaattattatgtaccacgccgattaaatcaactaatgatttttacttaaagtcttaaactctctaatgctggtttaagttctggataatgaaaacgataattatgttttaaaagtttatcagggatcacgaattgtccatgaagtaataaatcagacatttcgcccatcattagctttaaaacccaagcaggcattcttagcattgctggtcttgaaataacggaacccaaggtttgactaaactcattattatcaacagggttaggcgctgttgcattgatagggccacagatgtctttatgagacagtacaaataaaatgagctggatcatatcatctatatgtatccaagacatgccttgcttaccatgacctatagggccgccaagaccaaatttgaatgcgggtaacattttatcgagcgcaccgccatgttttgataacaccacaccagttctgagtagacacacgcgcgttttttccgattcagctttggttgctgcgtgctcccaatctcggcatagtacgtggctaaactcggggtaaatgtcattaaagctttcatctattttgcaatcgccttgtcgaccataaaagccaatcgcactgccagaaataaaagtgtgtggtggtgaattgcagcggttgattttttttgtgatttgttgggtcagcttaatacgactatctaataattctcgtttttgtgaatcactccagcgcttattaacaataggctcacctgctagattaatgattgcgtctatctgttcaaaatcgacctcgtctaatgacttaacagccacaacttggtgagtaagcaagacggccgcttggatagggttacgagtaagaacagtcactttatgatggttcaaaagaaatgggcacaaatgcttgcctataagacctgttccacccgttaataatatatgcattgtgacaccttagaagacagttggtctattttttatacatagtgatgatgatatttgcaaactatacgtaaaaagtagctgaatcgattagtttttcattcaagcttgaccatgaatacaatatgaggcgttgtggcttaattttgcgttatacattgctttatctgctaggttgattaacgttttccaatcgtcactatgatcaggagagagagcaacaccaatacttaaatcgatgtcaaaagtatgttgttctatttcaaaacagacttcaaaactctttaataaatgattaagcataggttctatatattcaatctttgagatgttttctacgatgatgataaattcatctccaccataacggtagatggcgtcatcggctcgaaaagtagagctgatacgttttgctgtttcaattaacaccttgtcaccaatactatgaccataattatcgtttaactgtttgaatttatttatatcaataaaaattagtgccagtttgttgtctactgaacaagtattaatggcatggcgtaaatggggttctaggtctgagcggtttagagcacctgttaaatggtcgtgttttgcttgaaaatttaatcttttagttcgcttatggatgatattgctcatacgttgaaatcgtttaaggaggtgacctatttcatcatgcctgtaaacaatacttacgttaggtttatctcctttttctaattgttcagtaatatgcagtaattgctttaacggaatgaagagttttttattaataaaaactgctgaaaaaacgcataataaaataagcagtggaatttgaattgaaattagatacgttaacaacaaactgtgttgttgaaaatctgacatctctatatctaacttttcacgttgtatattttgaaattcagaaattaatttgcgaatttgctccatgtactctttcccttcgttgctttgtacaacctccattgctgcttggattgcagagggactgttttgcatcactaaattaatagttaaatctaactcgtcaaactttttatttattaaaacatcaagttgagatagtttttcttgctgctctcgctgatgtattgtaattttagtcagggttaaaaagtgtgtttttgctttttttataccgtcgtagtagggcgttaaataagatgtattttgtgtaagaagataaccacgctggcctgtttcggcatgaactatttgggtgtaaagtttttctgattcgtcaattatttcgtgtgtatgatcaactgcctcgtgcttttgcctgccttctttatctaaaagcataactaaaacagtgttagtggtaaccaataaaagcaatagtattagtaaagctaaaaactgggttctaagcgacatagaaaaaccaacgacaagaaagttatattttttaagtataaagtattgtttaagatgcggacttttaccaatttataataaaaacaaaggctactaataatgtttttgggttgctaaatgttattatcttagttctatattctaagttttaaagtgtgtaatagctattttactggtatgctaaaaacttaaaaatcgcagcttaaaaatgacaaggagtgactgtgaactttctgcgccaatttcacgatattgtatcgaatcagcaaactaattttgatgataaagtggcgcaattgctgcattttggcttagcgattttcaatcttgattttgcaattgtgagtcgtgttgaagaacaagtgtatacagttattcacgtggtttctccaaacgatgcgattcctgttggggctcagtttgatgtagcaggaacctattgttcacacacattagctgcagacaaagcattatcatttaaccatgcgtcacagagctacatagctgaacacccttgttacaagaacttccaattagaatcttatattggtgcgcctatccacattggtaaaagggtgtttggtacggttaacttttcagcggcacaatctacagcaccattcacagaagaggcgcatgattatgttgaactttttgctcaatggttgggcaatgagtttgctcgtaatctatcatcagaaaaattaattaaaaagaactctatgcttgcacaagttgaagaggtggcaaaaattggctcttgggagctagatttaatcaccaatcatctttactggagtaagcaaactaaagttattcatgaagtccctgaagatttcaagcccgatctcgagaatgctattcaattttacaaacaaggcgaaagccgccaagccattgaaaaagttgtcaaagaagctattgagcaaggtaaagattggaatattgaaattgaattgataacagctaaaggcaaccctatatgggtatcaacagtcggaaaagctgaatttgaagagggtgcttgtgttcggataattggtacttttcaagatattactaagtcggtactgctacgtgaagagcttaaaaaacaaaaagctgatgcagaacgtacacttgaagatagaagcattttgcttgccaaaataagccatgaacttcgtactccgctcaatggtattacaggcatgttaacgactttgttgtatgaaaaatcagagcaaaagcgtgaagagaaactcaaaatagcgttgcgtagtgcagatattttgctgaatattattaatgaagtgttggatttttcaaaaattaatcacggcgaacttaagcttgaacctagtcacttcttattgaaaaccatttttgttgatattgtttctttgtattctcctttgtatcaacaaagtaaccttagctttgatgcgacgattgatatcagtgatgagtgttggaccttcagtgacaatactcgcattacacaaatagtctcgaacttgttgagtaatgcacttaagtttactgagcaaggtgaggtaacgttaactgccagtgctaaagagctcaatgataaagtgcttctgtcttttaaagtcactgattcagggattggcatgactgaaaactttatgaagtcgctattttcaccctttacacaagagataagtaaagatcgaaaaaaaggcggtacagggcttggcctagcaatagttaaagagctaattgattatatgggtggcacagttgaggtgaacagcgaacatagaaaaggcagttgttttgaaattaaactccctctagaaaaaggtcaacctcaaagccatcaacaacaagatgtaagtaatattgattttacaactcttcctctcgctattttggtcgttgatgataatcagattaaccggttagtcttgaaagcccatttagaaaaattaggcttaactgcagactttgcatgtgatggcgtcgatgcgatcaataaatgcaaacaaaacaactacaatttaatatttatggattgcgtaatgcctgaacttgacggtttagaagcaacacgttatctgagagctaatggtatttgtcctgaaaataaaacgtttattattgcattaactgcgaatacttctgcagatgataaagccgcctgtaaaaaagcggggatggatttgtttgtatcaaagcctgttaaaaatacggcaattgaacaatccattattgcagcaaaaggacatttagcgctttaaacataaggtttaaagcaattttatacttatatccctaaccctaacaatacattgcgattgcctaagtttaggctatcttcaaatttaacctatacttaatgtatataaaaatttggggtaatgtaatgaatcatgctcaaaatcgtcggcgctttttgaaaactcttagcgtaggtgctgcggtatcaacgttggcgtttaaagccccctatgtttttgctaaaaagcaaatcactttgcgcgttatggggacgcatgtcacattacaagaagagctcagacaacgcgcaatgcgtgagttaggcattaatgttgagtttaccccaatgggcagtgctgctgtactacaaaaagcagctgcaaacccaaattcattcgatctctatgagcaatggtctgattcaatcaacatactatggcaagctggtgcaatacagccattagatattgataggttaaactattggcaagaaattaaccctttgactaaaacaggcaagattacacctgaagcaagcataggagccggagattcacctaacaagttactttatgttcaagccgatggttccttgggaactacacctacaaagcaaattagttttatgccttatgtccataatgttgattcatttggctacaacactaattttatagaacaaggtattccttatgaaacagagtcatgggcttggttacttgatgaaaaaaacaaaggtaaagtggctttagtgaatgctcccactattggaatctttgatgcagctttagcagctcaaggcaaagaactgatgcgtttcaacgatattggcaatatgagtatttctgaaatagatcagctatttgcaattctactcgagaaaaaaaggcaaggtcatttcgctggcttttggacgtctgttccgcagtctgtagatttcatgaaaatgaaacgggtcaatattcagagtatgttttctccaggtgtaagtgcatgtaaaggacaggggatacctgttgtctatgcttctcccaaagaagggtaccgtgcatggcatggggttatgtgcttatcttcaaatacacaagggcatgtaaaagatgcggcatatgagtatatgaattggtggttatctggctatcctggagcatttattgcgcgccaaggttattatatttctaaccccgagcgcagtcagccgcttatgtcaaagccggaatgggattattggtatgaaggaaaagctgcatcaatagacctgcaaggtactgatggaaaagtgtcggttaaagcgggtcagatgcgagatggtggcagttatataaagcgtttttcgaatattgccgtttggaatacagtaatgcctaattatgattacagcttagataagtggtatgagctattaaactcatagggaattaaattgattaatatcatttctaagtcactggcagctaaagtattacttgcattaatgctggtgatattagtcatgggaataagctttgttgtgatgaacaagcgcctcaaaacaattgaagtgtctttcaatgatattagccgaataagcaattatgcagtaagcatcttaagcataaacaaagatattgttgaaatgcaaagagatatctctgtctatggctcgtctggaagtgaagctgtttttagtaaaatcatagagaatttcgacagtgtaaaaagccgtttaaatgaagttaacttgaaatcagatgagagtgatagccaagtatatttagactctatgtctgagttaatcgacagatatagtgataatttagctgtcctcacgaagcgatatgaaattagagcagagctcatcgaagttgaacttccgagcatttattttgaggccgttactcatcttgaaaacctaaagaagctagctgtttctaatgaacaaatgttgatcatcgcggaaagcctcaatatgtggcatgtgctacatcgtgatgcctatcaatttttaactaaaaaagactatacaaaacgaactgccgttaataatgctttgcaggtgttatctgggcttaataatgatctagctatgacacaacaagacgatgttcagagtgaaattttaagaacagcgacattagcgagcacttatcagaacactttttcaaaagctattcaggccaatcgcaactactttagtttggtaaatgttgtaatggcgggggatgcaatcgagtttagtacactagcaaataagctaagagagaattctttagcccatttaaatcagatcaaaaaagacgcagaaatcacagtttctaaaaccgaaaaaatattaaaagcactggcggctgtcgtgtttatttatgtgttagcgcttgccgcattttttcatctacaaatatctcaagccatcaagaggctcactgtcagttttcaacgctttttagagggggatttatcggcaccaatacatgatttaaaccgtaaagatgaaattggagttcttgcaagcgcagcagatagctttcgtattttaagtcgtgatctttctgaagcaaaaaaagttgcagagcacacgacaaaagtaaaatcagagtttctcgccaatatgagtcatgaaataagaactcctatgaatggtattttaggaatggctcgacaattgagtagaacaacactcactacagaacaggcaaagatgcttgctattattcagtcttctggttcgagtttattagtgattattaatgatattttggatttaagtaaaatagaggcttctaaaattgagctagaatctcaaccaattaagttaagcagtatgttagatgaactccagcatctatttttagaacaagcacatagcaagaatattcaatttaatattgaaacaagccctgatggcaaagaggccatcttcttaggagatgaaacgcgtttgaaacaagtactaattaatttacttggtaacgcaattaaatttacagagcggggtaatgtgacgttgagtgttgaaattgctcaacgtaatgatgaatttagcttaacatttaacgtaatagatactgggattggtatagtcaaagagcacatgagtaatttatttgaagccttttcacaagctgatgcctcaattacacgtcgctttggtggtacagggttaggtttggctatttcgagtaagttactcaatttgatgggcacaactttacatgttgaaagtgaagctggtgttggttcacgtttttattttcagatggtagcaaaacagagctttaagcatgctgatataaaagaggtaacgctgatgaaatttccagatgagtcttttgatttctcaagactaaatgttctgattgttgaagacaatgaaatcaatcaggtcgttatcgaagcgatgctaaatgaatttaatattagctcaataaaaatagcaaatgatggtgaacaagccatattacaatgtgagaaacatttatttgatattattttcatggacatgcaaatgcctgttttagatggcccacaggcaacaataaaaatacgcgagaaagaagcctttaaatcaacacctatcattgcgttgacagctaatgtattaagtgcagataagcagcgttgttttgatgctgggatgaatgatttcattgctaaaccaataaagtatgaatctctaaaagaggtattgttaaagtggtgcacaccagcagatgacagccaagaggagcattatacctgctcaaagtgagcctatgtgtgtacagtaaaatacgaatgtattgttttcgatttgtttgtgcttttatataaattaagttgcagagtacaacaacaataatcccaagctaatcatttcaactcgtataaaaagtccgtataatccacgccgaactttttactatgaaacatggcttagcaaagcctgtatgagcagagcaaatgaatcaaactgatactagaaaagaaactcttgaatttaataaacttcaaaagcgtctaagaaggcatgttggtaacgcgattactgattacaacatgattgaagacggtgatgttgttatggcgtgtatcagtggtggtaaagattcttttgcgatgctagatattttgcttaatttacaaaaagcagcgccaattaaatttgaagtgattgcggtaaaccttgatcagaagcagccaggctttcctgagcacattttgcctgattactttgaaacgctaaatatcccgtattacatcgttgataaagatacctactcagtagtaaaggaaaaagtaccagaaggtaagacgacgtgtggtctgtgttcacgacttcgtcgcggcacactttattcattcgcagaaaaaattggcgcgacaaaactagcacttggtcatcacatggatgatattgttgagacaatgttcttaaatatgtttcatggttcacgtttaaaagcgatgccaccaaaattacgctctgatgatgaacgtaacgtagtaattcgtccgttgtcatattgccgtgagaaagatttaattaaatacgcagagcataaagatttcccgattattccttgtaacttgtgtggctcacaagaaaaccttcagcgtcaatcaattaaagccatgctgacagagtgggataagaaaactcctggtcgtgttgagagtatctttaagtctttacagaatgttagcccaagtcagcttgcagacagaaacttatttgattttgaaaacttaccacttgatagagaaggcaatcgtgaaagctatgactttagcgaggcggtagtctcttcgacaaacattgatgaatcattatttattgatgtaacaaatatataataccaatccgcaataatacttaagcgaattggtataaaaatgttatttagcaagagggctgacgtagccgtctggttttaacgctaatacatcacaatcaagactatcaatgacatgctctgcagtgttaccgacaagcgccgcgcttaaccccgtgcggccaacagtaccaatcactactaattcgctgtttaaccgtgcagcaacatcaggaatgacatcttctggtaagccttcttcaatgtggcaatgagctttatcaatattaaacccttcagctaacgaaagcgttgattcaaagtgatgtttcttaactgattcgttataaacacccgggttgaactcaggaatttcaatagcaatgttaaccggagttgcagggtatgcattcacaaggttaagagtggcattcgctaaatcacaaatgaagcgagcatcattaataatacgtttgttaagttcaaggtgttgctcgttttcacttaccgcgttcactgctgcaagaatattaccttgtgctggccactctttttctttaacaagtaaaactggagcagggcacttgcgaattaggtgccagtcagttggcgtgaagataactgatttaagcgtatcgtgttgatgggtaccttttacgactaaatcatagccgtcattaataacagtattaatgattgcctcgtaaggacggttatgccaaacaacacagctatcaatggtaagctcaggataaagtgcaatttgctcgtctagccatgcttggcgatctttgattaccgcctcacgcatcgcttcacgctcatcagcagaaagcatcgtggtcatttcgtaagagaagtcgtagatactgaggaaagcggtgatggtcgcgccagattttttggctagatcaattgagcggcttaaactgtgttgctgctctttggttgggtctataactgctaaaattcgtttaattgcgtccatgtgctgctccttaactgttccgcaaaaagtagtactttgagtgtaacctaaatttagaacagttaaaggggcaaacaatagaaagttgctttaaatcaaactctacttacatttaatcgctgctgttgttgcaagtgcttgctggtccaaaatggtgataaatttaccttcaaccttaataaaaccggctttttggaagcggcttaaaaggcggctaattgtttcaacagtaaggcctaaatagttaccgatctcgccacgtgtcatggttaaacggaattctttacgcgaaaaaccacgctcaccgaaacgttctgcaagattatagataaaactcgctaggcgctcttcagctgactttttattgagtaacaataacatttcttggtcatagttaatttcattactcattaaacgcataatttgttggcgtagctttggtaatttacctgctaaatcatcgagggtatcgaatggaatttcacataccattgaggtttcaagtgcttgcgagaagctttgatgagccattttgttaattgcatcgaaaccgactaaatcaccagctaaatgaaaaccagtaatttgctcatcgccttgctcagataacgtgtaagatttaaacgaacctgagcgtaccgcatatatcgcatttaagctttcaccagactcaaataaaaagtcacctttgtgcagtggttttttgcgctcgatgatttcatcaagacgatccatttcttgaccgtttaatgaaaatggcaaacatagctggctaatactgcaattattacagctaattgtgcataagccttttgacttgttttgtgagaagtccatacatcaaatccattcaaataagttaacaacgcgtaagattaatgaactagcttatcggttgctataattaataagtatataccgtaccatattattacgctgcctagaataaccctagtccaaacatggttgaaaatagcgtttattttttgactgactagacctacgcttatcatggcaggaaaggttcctaacgcgaaaaataacattaccccagccccatgaagtgctgatggactggtgagagcccaagtcagtgctgaataaactaatccgcagggcaaccaaccccataaagcgccatagagtagggctttaggtgttgtatcgaccggtaataaataacgattgagcttagctaaatgctgccatactagggtttttcctagtttttctaaccactgtagggtcgccgctaagcgcataatataaaccccaacaaggagcataaaaatgccacttaaaaacgataatgctatagaaatagtggtattttgcgctgcaaaacggctgctaattccagcgactaaggcaccagcaagcatgtaactaagcgcacgtcccagattataagcaacagaaaaactgactgcgcggtttttgttagcagcaagttgtaaactactggcaattccaccacacatagctagacagtgaccactgcctagcaaacccattacaaatgcactaataaacagcggatcaatcattacttttgttgtgctgctctttatcgtcttcgaacaggatactgtggccctgtttgtttaaatcagaaaattgttcgctttttacagcccaaaagaacaccccaatagcaattagcacaaataatatggcaatcgggataagcatgtagatgatactcatagttttaataaccttaatgagttggtaataaccaaaatggagcttgcagacataccgatgacggccatccaaggagcaacaagcccaagggctgccagtggtaaaatcgaaccattataaataagtgatagtgccaagttttgcttaacaatacggcgtgtctttttcgacacagttagcaaatgctcgatggcagttagatcactattgagtaataccacatcagcactgtttttggaaatatcagcgcctgtttccattgcaatagataaatgggcactggcaaatactgggctatcatttactccatcacccaccatggcaacaatggcgcctttgtttgcgagtgcttcaacatgagtttgtttgtcgcgagggctacatgctgcgtgcacggtatctaaattgagctgttttgcgattcgctcaccactgtttgatgcatcacccgttaacatgtgacactttatttgttgagagtgcagctctgtgattagtttttctgcgttgttacgtaagctatcggcgagataaaagcgcgcaactacttgtttatcgacatacaaggttgcttgtgcatctgctttttcggtatcaaaccagccgcttttacctatcgctaggtgctgtttattaagctctgctgtaatacctttacccggctcgattgtgacattttcgatagggttaaccgtgtcgttgtaggttgcaaacgcattggcaattgggtgttccgagaagctttcaagttgcgctgctaatcgtaatgcatcagcttcactataatggctgctgaccatttcaacacgctcaatagtgaaacgaccctgcgttaaagtacctgttttatcgaaggcgatatctgttaattgtggtagcgtttctaacacatgggcttgtttaattaaaatgccacgctttgtaaggctggctacggcacaggttagggcagttggaatcgctaaactaagggcgcaagggcaggttgcaacaagcaccgaaatagtaacccaaaaagcatgctcagggtctatttgataccagccaatcgctgtaatggaggcaaacagtaataaacacgcaacaaaccactgcgcgactttatctgtaatctcaactaatcgaggacgtttggttaatgctgtgtgttgtaacttaataatttgattaagcagcgtattttggccgattttgttgatctcaatactgatcacgccatcgtggttaatagtaccagcgtaaacctgatggctgataaatttattaactggctgatgctcgcctgtcatcatggcttcatcaacagttgttttacctttgatcacaacaccatcagcaggaatggtttcgcctgctttaattaaaacaacatcgcctaatttaagctttttagcagcaataattgattcttgattatcgctattgataattcgtgcagttaaaggtaaaagtttttgtaagttagcagtaaattcactggcttttaaacgggctctaaattctaaatatttacccaataataataagaaggtaaacatacagatagattcaaaataaacttcgccaaccgacattaatgtggcataacagctcgcaccataagcaccaaaaatcgctaaagatacgggtaagtccatattgagctgtttggcttttaaaccattaattgcattagttaagaacggcagggcgctgtataaaataaccggcgaagcaagaactaagcttatccagcggaaatactgttcaaagttttcttccatgcccgagaacatgccaaaatacatggcaaaagcgaacatcattacttgcatagtcatcagacctgcaacacctaatcggcggatataggctttagcggcttgttgtttttgactcgcttcaaggtcagcctgaaacgggtaagctttatagccgatttcgtgtaatgaagtgataatttggctaagtggagtaaccgatttatcccattggatcatcgcacgattagtcgatgtatttacatccacacgcttaattgcttttaaattgagtaattgtttctcgattaaccaagcacaggcagcacaggtgataccttcgacggtaagaagcacttctgataagtcatttgtggctgaaataaactcatcttgtatatcttcgttatcgtagctcttaattaactcaagctgctctggaacaagttgttctactttaccagagcgcacagttctaaacttatagtaatcggtcatgccttgggcgacgatattctcagcaaccgtttggcaaccaatacaacacataggttgtgccttaccgtctatttcgacagtcgcattaaagccttttggcacactttcaagacaatgaaagcaattatcggacatttgagtttactacttatattcagggctaatcgaaattgttttatcagtaggaagagtaatgtcttcttttaacttccaactattatcgataggttcaataaacactgtgtatgcaccgtcaacgtgagtgtcgagtagggctgtaaagtcaccatgagcgtttttcattaaactaacattgaagtcattggctttaatggtgcgatgataaaatgacatttttaaagagtgaacttggcttgcatcacctttagtaaacttaaagctaactttatcatcagttacgtctaaatcaccatgcagatatagtgctttggctttattgaatttactgagttcaaggttaattgccttgccttttttatagtagtcatcaacaaccatatcagggccattgccaatagccatataaattagaccaaaacagccgataattgcagcaagcgggaaggagattaaaaaccatggccaaaagtttttataccaaggagtcggtttcatagtacttataccttaaaaaatgttgtacgcattttatcggatctaaaagcaaaagactaaaaaaaagcctccagatggaggcttttttgatcttaattaatctattgaattaaaagattaattgtttatacattttattaacgacgtggttatttatcttgcgataagctgtaaacgtacgctgttaataggtgtactttatcttcacctagaatgtccttccatgctggcattacaccggcacggccatttctaagtgtttcttcaacagcacgtttagagccaccatacaaccagatgttatcagttaggttaggtgcaccaaatggtaagttatgtgcaactgaacctttaccgtcagcaccgtgacacgctgcacacattgcgaacttcgcagcacctgcttcagcatctttttggtttacagtacggccagataagcttagtacgtgagcagtcatttctttaataccttgctcaccaagtgcatcaccccaaggtggcatcgcagcaacacgaccataaagaagtgtttctttgattttgtctggtgtaccaccatataaccaatctttatcagttaggttagggaagcctaaaccaccacgtgcatctgaaccatgacactgagcacagttttgagagaataaacgttgaccaatttcaagcgctttttcgtcttttacaagcgcttcaatatcttgcttcgcgtatgactcaaagattgggccaaaacgctcatctgctgcaataaactcttggtctaattgaacgttctcaccattagctaatgcttgttcagttgcttctttagactcagctaaagaagtaataccttggttagaacttgtccatttacctaaaccttcccaattacctaaacctgggtaagctgcaaggtaataaacagaccatacaaatgtcgcgaagaacatgtaagtccaccattttggtagtgggttgtttagttcttcaatgccatcaaattcgtgaccacagctttcgccttctttaacacctgtgtagtttttcaagttccacagaagtaggccgaagatgatagcaagacacgcaagggttaatacaataacccatatactccaaaagctagtcatttctcagactccttttcctcgttagagattgtgttgttgtgttttttttcatcttcaaatatggcattagcagcattatcaaatcgacttttgctacgcttgctgtatgcccatacaacaatcacaataaacagtactaaaattaccagagttaaaatgcctctgtatgttccgtaatccataataattacttcaagtgtgtgccaagctgttgtaagtaagcgataagagcttgcatttcagtcgcgcctttaccatcgttcatggcttcaattttcgcaatgtcagcttttaactcttcgtcgctaccataacctttaccgtcgtaacggtcgcttgatttatcaattccgaagctatcacggaatatttgaagctttttaagagtatgggttgtatcgactctgttttcatctaaccaaggaaacgctggcatgtttgactcaggaaccacagcacgtgggtccattaagtgagcatggtgccaatcgtctgagtaacgctcaccaacacgagctaggtcaggaccagtacgcttagaaccccattggaatgggtgatcccatactgactcaccagctacagagtagtgaccataacgctcaacctcgtcacggaaaggacgaatcatttgtgagtgacagttgtaacaaccttcacgtacatagatatcgcggccttccatttctaacgctgtaagagggcgtaagccatcaacaggtttagtcgtatcgtcttggaacataagtggtgtaatctctaccaatgcaccaaagctgatagcaaaaacagtcaagatagccataaggccaacgttcttttcgactatttcgtgtttgttttgtgaattattattgctcatcgtgctactccattatgctaattgtgcgtcagcgtctaattgaagcgaatctttcttcgctgcaatagtacgataaacgttgtaagccataattagcatacctgttacgatgaatacaccgcctaggaaacgcatgatatagaacggatacgaagcttctaatgactgtacaaagctgtacattaacgtaccgtctgagttcactgcacgccacattagaccttgcattacacctgagatccacattgctacgatgtatagaacaacacccacagtgtgtaaccagaagtgcgtgttaactagtttaacactgtacatacggccttgtgagaatagtgcagggattaggtgatagatagcaccgatagaaatcattgcaacccaacctagtgcacctgagtgtacgtgacctacagtccagtcagtgtagtgtgaaagcgcattaacagacttaatagccatcattgggccttcgaacgtagacataccgtagaaagatagagaaacaactaagaaacgaagtactgggtcagtacgtagtttatgccatgcacctgataacgtcatgataccgttgatcataccaccccaagatggaacgaataggataactgacataaccatacctaagctttgcgtccagtctggaagcgcagtgtagtgtaggtggtgaggacctgcccagatatataaagaaacaagtgcccagaagtgaactaccgataaacgataagagtaaacagggcgacctgcttgttttggtacgaagtagtacatcatacctaagaaaccagcagttaataagaaaccaacagcgttgtgaccgtaccaccactgaaccattgcatctacagcacctgcgtagatagagtatgatttagtaagtgaaactggaattgccatgctgtttacaatgtgtaaaacggcaacagtaataatgaaaccagcgtagaaccagttcgcaacatagatgtgcgatactttacgcttgattagcgtaccgaagaatacaactgcgtatgtaacccaaacaacggcgataagaatatcgattggccattcaagttctgcgtattcttttgagcttgtgatacctaaaggtaaggtgatcgctgcaagtacgataacaagttgccaaccccagaaggtgaaggctgctagtttatctgagaaaaggcgcgtttgacacgtacgttgtacgacgtaataagacgtcgcaaaaagagcacttgtaccaaatgcgaaaattactgcgttcgtatgtaacggacgtagtcgagagtaagttaaccatggtgtatcaaagttaagtgctggccaagctaattgggcagcaatcagaaccccaacactcatgccaacgatgccccaaatcactgtcataatagcgaattggcgtacaactttataattgtactcagtttgtgatgctactgtttggctcattttctggcttccgctgcaattaatgcgttttagaaatgaattacccacttgataaaagtggggcctactattacttcacaagtgtgttacctaaagctagctaaaaggtgttagcttcagaaaacaaactcgagaaacccttatttttgcgatggaaatgataaaatttttgacctaaaaaagataggtcaattgcataaaattatgacatcaatcaatttttgatgttttgttggttattttttgtcagtgattgtatttttattagcttattccatcgagcatagttgtcttttatctatgacctgactagtatccgcttttattttatacaggcaaagaaagtgagaattagtttactcccagttttcctgctcagtatttttactgctgcgtgtgattaccaaagtatagaagagggtagcgcaagtacaagctgtgaaaataatagccgatgtcaatttactaataatgtagaagtttggttaagtaattctaaagttagcccagaaaccccttttacaattaacttgaagttgccagatgatgccaaaaatccctcagctaaacttgaaggtgtatctatgtatatggggttcatcccagttcagtttactaacactgaacaaatatggacagctaatacaatggtaggggcgtgttcagaacccgtcatgacatggaagatgaccgtgacctatcaagatgctagtaacaaaacacacacgcttttttattatttcgattctatccaaccttaataccgcaacatttatatgtgtatcaccaagtaactgtttatttgactaagtgatacacaccatcaaattagttttcctacaaatcgacgccatttaactaacttattccaagaaaaccacaaagttttggaacaaatctaaaaaaacgtcctccaatacagcgattaaccgactaactttgtctaattagttaattttagtgaataactatggttagcagtcttaccaagcttttacggtttttataacgatgtgtgatcaagttgtaaaaatttcatttgtagcctcaatacggccctagttacacttgattacaaagttcgtgcaattgatttcaatcgtattttttttggttgtaaagtattgtagaaatctgattttatagtgtttttttctgttaacattgatacatcgtgaaaccttattaccccaattggaaactggaaatctagactgtttttttattgttctatcattcagttttcgttcagttaactgagcctaagttgcctgccgctgactcgtgattcgaataataacgagcgctacctaactaaggtaaatttccaacaagtagggttttcacatgaaaaaatcaattcttggtttagctgttgtatcagcaatcccaatgttctcaagcatgcaagtattagctgctgaagatgcggcagattcaatcgaaaagattcaagttacaggttctcgcattaagcgtaccgatatggagacgtctagtcctgtaacattaattggtgcagatgacatcaaagcaatgggtgcatcaagcatcgatggcgttttacaaaaaatgactgcagcaagcggtgcaatgaccaaccctgctgttaacaacggttcaggtggtaacgcacgtgttgacctacgtggtcttggtgcacaacgtactctagtactagtaaatggtcgtcgtatgatcaactctggtactggtgcagcatctactgttgacttaaacacaatcccagtatcaatgatcaagcaagttgaagtactaaaagacggcgcatctgctgtttacggtactgacgcggtagcgggtgttgttaacatcatcttaaaagacgacttcgaaggtctagacatgaaccttaacggtgctatcactggtgaaggcgatgcagacgaaacgtctttcgatatcacaatgggttcaagctttgaccgtggtaacgttgtaatcggtttacaatacactgaccgtggcgatgcttctcaagcagatcgtgacttctctgattgtcctatcgaagaagattacgacaacggtagcttctactgtggtggttcttcttatacacctttcggccacgtttgggctgaaaatgcagaccttcaaggtcaagcagatggtggttggcatgattttactgctgctggtgatgcatacaactactcagcaacaagctacctatacacgccaatgcgtcgtttaaaccttacaggtatcggccactttgacgtaactgatgaaacgcgtctagtgtctgaattcacttactctaagcgttggtcaactcaacaaatggctccacagccagtatggtttgacttcaaatacgatgcagaaactatgggtgattcacttctttctcatggtgttactgacggagaagatatctcttacggtcgtcgtatgacagacgtaggtcctcgtggttatgagcaagttgttgacacagtacgtgcagtaatcggtctagacggttcattcgacaacggttggggctgggatacttcagtagtattcggtcgtaacgattcagttgaccgtgcaactaaccttctaaacatgggttcaatccaagatgcaatcggtgaaggtgagtttaacccactaaaccaagctgactggtctgctggcaaccttgcacagtacaactacactgaaaacaactcaggtggtagccaattattagttctttcagctggccttaatggtgaagtaatggaacttcctgctggttacgttggtttcgctgcaggtatcgagcgtcgtgaagaaaaagcatggtacgttccagattcactaacttcacaaggtcttgcaaatgacccacgtgttgaaccaacaggtggtcgtttcgacgttaacgaagcatacgtagaatttgctgttccacttctagctgatgcaccatttgcacaaatggttgacttaagcgcagctgtacgtgcatttgactacagcacatttggttcagatgagacttggaaactaggtttaacttggcgtgtaaacgacgaactaatgctacgtgctgttcgttcaactgcattccgtgctcctacagtatctgagctttaccaaggtaaatcaccttcattcgaacaagttaacttccctggtgcacaagaccaagctgaagtaactgtgggtggtaacgaccaattaacgccagagcttgctgatacagtaacagctggtttcgtatacgctccagagtggttagatggtttctcaatgactgttgactactatgaaatcgaaatcgaaaactcaatttcaagcgtaaacaaccaatacatcgttgagaactgtctcgacgctgctacaggttcatacaaaaaccaagatactgcactttgtcagtcttctgcaatcaacttcaaccaaagcactggtcgtattagcttcaacaaccaattacaaaacattggtaacgaatcgactaaaggttacgacgtaaacttcaagtatgcatttgaagctgcaggtcttaactggcgcacaggtcttgatgtaactatccttgatgagtacatcgttgattcaggcacaagcacaatcgattacacaggtcttgtaacttctggtatcggtagctacgcgaaagttaagtctaacttcactcttaacgcgtctggcgacaactgggatgcacaataccaagcacgtatgatcgacggcctagacagctatgcatgtcttgctgacgacagcgagtgtctagtaccaagcgttggtactgttgtataccacgacatcagtggttcatacatcatgaacgacacagtgtcattctctgcaggtgttaacaacttattcgataagcaagcaccttactactcaggtaacaatgactcaaacactgacccgtacacatacgatgtactaggtcgtcgtttcttcgctggtgtgaacgttaagttctaatctagtttgaaatgattattaaagccccgttttacggggcttttttattgtctgaaagcttatcaacgcgtaaactgtagaggtacttttaaaaaacgaggtgatattgcttaaacaagacgaaaacctatcttttattattgagcctgaactcacgccccgtgcagagcagcgcttagatctgtatttctcaatccctaatgagatgagtgttaatccacaaacacttagtgaagagtcattttttaataaccatttcaaatcacatttagcttataacgccaacaatattcatttacccttggtgagaagtcgctttgttagtaaaaacaaaggtgagcagcaagattatcgacaaaatttaaacttatattgctaccaagttcgtttagcgcttaatgctgatattaaagacaccttaaaataccaagaagctgaagagttttatcctgcagccattgaattatgtgagcaaaccaaagggctgcttaaaaagctgagacgttacacaccagatgatgaaaaactactgccattttataaaaatgccgataactatttaagttggcatgttgaacagtcatttttaaagttgctagacgaaggaccacgcagtagcgattttgcaaaagagcgcagcgagctcttagagttttgtaaaactgaaaatagttaccgtgacgagcaggaatataactcgcaatcaacccttgaagatgccaatcgaatcactaataaaatgcgcctgttacaacgtttgattgaacatggtgtggttttaactcgtcatacccgacatttgaatagctacttaaagcgcattgtaaagggctctgtaacggctgttatcatggcctttgtaatgttagttgtgttaaacgcccgttcaacctttactgaggtaactgcaaccttaattttgattttaggtgtaatttatgggctgcgagagatattcaaagaggatattacccgcgttatatggcgagcaatagtaagagggcggccaaaatggcgttttcaatttagaaatagtattactaaagaccgtattgctagtcagtatatttggctagaatacgaagcttttaagcgtattcccaaagaggttagacaaatcttctctaagcgtcgccatcagaacaagcaggcttctcaatggttacattttgctagtgaaacacacgttaatgctaaagagtttttaccgggctacgataccctacaacaaacgatgcaatttagtttagcgccattcgcacgttatttaaaacgaggtgaaggcaaactttatcatcttgaaagcaataaaatatctaagcaagcagttgagcgtaggtatcaactaaatatggtattggttttttcacaaaacgatgaaaaaacactgatgcagcgctacaaaatcaccttaaatcgcagcaaaattgttaatattgaaaggatatattcgacgtcagttaaataaagagaaacgagggtggtacattaccaccctggtaggtttatttagcgtctaaacctgttttgctgtacagcgacactttatctgaaactaatgtaatttcgatatttttgtctttgctgccccaaatacaattagtatgaagtgttttttcttcgcacttatccgccgagcctaaaatcgcttcaacttcagctttatccataccgattttaattttttcatagttttctaagttaacttttgaacagccagctaaagtaagcgctaccgttgcagcagcaattgccatatattttttcataatagtttccattaatggttataacgtcttatttgtacaatcatccccatgcgagggtgatcgaaataatgaatttcattacttattacacgcttaaattgtgaaaaacgtgctttttcatagtcgccactctctaaacgctgactaatatcaaaatcagcatgaataaacaggtaatggcgaacgtatattttcatcaagccttctaattcccacttcggtatcgtttgtaactgttcgggaatatattgctgtaccgggctaactagattaataaagtcattatcagtagttgcttggctatcgagcacttgtgaaaagtgatcacctgaaaacaatctaatactgggggctttactttcgctcatttcaggaaaacgccaacctgtgtgaagtatcggcgtgagacctttacgatctagttgctttttttgttcgataaactgtagctgctcgggcgcgagtagataaatttcatccgtgtcgtcgcgagcttcgactacgggtgttacgggtaattcgtcataactagataaataatcaacactttcatcgcacacgttagagtggggattcgaggtaataatagcatctgcaaatgtcgtagactgaaatcgactgtcgccatttaagcactcttgtctagcttgcgctgtataagctggagaaagcagatctttttcgcgcttagcagtaatctcatcatgctttaaagaaaaatcttcttgtaaataaggtgctgggcgttgtttatagataagtacttcaatttcaaaccatctcgttgcaaacgatgagcttgtaaataagcaacacagcaacaaaaaactatttcttaacaacattaatggctaacctttttctcgaaatctgcaatcattgcagtgaccatttttaagcgttcgcgagggtttgcctcactaatcgcaaagcgcaatttattcgcgccatccattttatacacctgtggtgcactttgtatcaaacctataatgaagctagggttaacctttgtatgctggctaaactcaaaataaccgccttttggatttgcttcaattttcttaatgccaatattgcttgcttgcagttttaattgctgcaaactaaataagtttttagtggcatcaggcagcagaccaaagcggtctattagctctacctgtaattcgtccatatcgttgaggttagcacagcttgcaatgcgtttatagattcctaaacgagcatttacatcatgaatataatcttcaggtaataaggctggtagttttaaatcaacctcagtctgttgacctagtaaattctcaagggttggctctttaccttcttttaatgcgttaacggcttgctcaagcatttccatatacaaactaaaaccaatggtttgcatttgccctgattggtcgtcaccaagtaattcacccgcaccacgaatctctaaatcatgggtagcaagtgcaaagccagcgcctagatcttcaagcgattctatcgcttctaaacgttttacagcgtcttttgttaacgacttaggattacctgttagaaggtatgcatacgcttggtggtggcttcggccaacacgccctcgtaactgatgtagttgtgcaagccctagcttatctgctctatccataataatggtgttggcagtgggtacatcgataccggtttcgataatggtggtacacacaatgacattatatttttggtgataaaaatcactcataatttgctcaagctcgcgctctcgcatttgaccatgtgccgttgtaacactggcttcgggtacccattcactgatttcttcagcaacacggtcgatagtttcaacattattatgtaagaaatacacctgaccaccgcgtttaatttcacgcaggattgcttcgcgaattagttctgcatccctttgtctaacaaaggttttaactgctatacgttttgcaggtggtgtggcaataattgacaggtcacgcataccactcattgccatgtttaaggtacgtgggataggggttgctgtaagtgttaaaatatcaacatcggcacgtaatgctttgattttttctttttgacgcacaccaaagcggtgttcttcatcaacaattaataagcccaaatctttaaatttgatatcttgctgaataagcttgtgtgtaccaataacgatatctaatttaccctcagccattttatctagggtatctttttgctcttttgtagaattaaagcgtgataaaacaccaacttcaattggtaaatcggcaaaacgatctttaaagttttcataatgttgctgagcaagcagtgttgttggtaccagcaccgcaacttgcttgttatcgttaacggccacaaaggctgcgcgcattgccacttcagttttaccaaagccaacgtcaccacacaccaaacggtccatcgcttgtttactttgcatatcaccaagaacagactcaatggcgttgcgttgatcatcagtttcttcaaatgggaagctatcgctaaactgacgatatgcactgccatcaagcttaaattggttacccggttttgcttggcgctttgcgtaaatatctaatagctcagcagccacatcacgaactttttcggcagcacgttttttagctttttcccacgcatcggagcctaatttatggagcggggcagaggcttcttcgccaccagaatagcggctcagcatatgtaacgctgaaacaggtacgtaaagcttcgcttcgttggcgtaaatgatggtaacaaactcggtgataacaccggcagcatcgatggtttcaagcccctgatagcggcctacaccgtggtcaaggtgcacgattggctggccttcacgtagctcagcaaggttacgaataagcgcatcttggctggcttcgtatttgtgtttacggcgtcgacgctgcgataccttaatacctaataattcttgctctgtgataatggttaaacgcggtttaccgtctaacaccacactttgttcaagtggcgaaacgatgaggccaacatcgcttgtactattggtaaaatcgctaaaagtttcaaactctttgagctttaaaccacttggttttaataatgtcagtaatgattcgcggcggccatccgattcaaccgagagcagcacgcggcctttttgttttttctcgctagcaacatagtttattaaaccttgatacggttcatgtaacttatgatctatacgtacatttggtagctctttactggcaaggtttgtatggcctgctttggtgcctaatttggcttgtgataaacgaatacgtgcgtatttaccaaattcaccaaacagctcattaacactttgatagagcttaattggctcaagtagtggtctaagtggatcaacacggcgattttcgtagcgaacatttacatcgtgccaaaattggtcagcagcatgttcaatatcgccaaaatgcataaacgtcgtattgcttggtaagtaatcgaagatagtcgccagtccatcaaaaaacagtggcatgtaatattcgataccggcaggccaagttcctttggtaacctgcatataaattgagtcttgctcagagcttgcgccaaattgttcacgataattgatacgaaaacgctcgatgtctgagtcgttagttggaaactcgtgagctggcagtaactcaattttgtcgactttttcatcagagcgttggctttcaacatcaaataaacgaatgctgtcgagctcatcatcaaaaaagtctaaacggaatgggtgagggctacccatagggtataagtcaacgatagaaccacggatagcgtattcaccatgctccatcacttgttgtacatgtaaatagcccgcttgctcaaggttttcacgcagtgtatgggtatctaaggtatcgcccactttaaagttaagggttgaaccgtaaataaacgaagcaggggctgtacgtagcatcaaggttgatactggcacgattaatacgctttgttgttctttttttaatgtatttaaggtggctaggcgtgcagaaataatatcttgatgcggcgaaaaatgatcataaggtagagtttcccagtcagggaagaccatgactgggttttcaggcaatagaaattcgagctcagtttcaaggcgtagggcgcttggcgtatctggggtgacaatcacaaccagctcgttgtgttgttttacaccttctgcgatggcgatgctcagtccgctaccggtaagttgtccccattgaattttatctttttcagattttacccaaggcaatgctgcccattgcgcaaacgccatttactactcctttaaactgtttttactgcttagtctcgataaatcttggttaagtcctgatagtgatcgatacgacgatcacgaaggtaaggccaaattcgacgaatgttttcactacgcgcttggtctaattcaacaaccaataattgctcatcactgttgttagcttcggctaagatttcaccttgagggcctgcgataaacgagttaccccagaactgaataccttcgctttgaccgcttggatcactttcgtgaccaacacggttacagctgatcaccggtacgccattggcaactgcatgagcgcgttgtgaaataacccacgcgtctttttgacgtgtttgttcgtctttttcatcacgcgggtcccaacctatggctgttgggtaaattaaaatttcagcaccagccattgccattaagcgtgccgcctcagggaaccattgatcccaacacactaatacgcctaatttaccgacagaggtttgaataggctcaaaacctaaatcacccggtgtaaagtaaaacttctcgtaaaaacctgggtcatcaggaatatgcatcttacggtatttgccggcaatgctgccgtcagtttcaagtaccacagcagtattgtgataaagccctgtagcgcgcttttcgaataatgatgacacgatcaccacattgagttctttggcaagtgcgcctaaggtgtctgtgcttgggcccggaattgtttctgctaaatcaaaaacgtctacatcttcggtttggcaaaaatataaactgcggtgtagctcttgaagaacaataagcttagcgccttggcttgctgcatcacgaataccagcaatagattttgccatattgtcttgagcattatcggtgtttgattgctgaacaagagcaacctttaaatgcgttggtttagtcattgtttgttcctgctaaaaagccgcgcggtaattgcattgtaatacagtgtaagctgccaaattggtgaataattggcacacaattaatacccaccacagtgtgatctgggtatgctttggcaacctgaccaagcgcaagttggtcgttttcatcaccataaattggtactaaaacggttttattgataattaaataattagcgtatgtggcagggagtctgtcaccatcttcattgaacactgcttttggccaaggtaaggcaatcagcgtgtagttttcaccatctgctgttttaaatgattgcagttgcttttccattgcatcaagggcagcaaaatgctcatcatttttatcatcacactgtacatatacaagggtgttgtttggtgcaaaacgtaccagtgtatcaatatggctgtcggtatcatcacccgcaaggtaaccgtgatcaacccaaaggaaagacgtagcgccaagttgctcaactagcgttttttctatatctgcttttgtaagtgctgggttacgatttgggtttaacaagcactcgcttgtagtcagtagtacgccgtgctcgttgatttcgacgccgccgccttcaagaaccagttcactttgctgataaccatttttagggtttgcaacttgctttacaagcacttggttaatttggttatcaagttcgcttgcaaatttattgccccaaccattaaaaataaaatccattacttttaattctgttgcgtcatcaatattcgcacaggttaatgggccatggtcgcgtgcccaagtatcgttacagggtgtcaccacaaagtgaatgcgcttagcatcaacatttgcggtttcaagtaatccggcaatatgtgctttaagggcattatcatgggccacaatcacaacatcttgttgctggcttattgcttggcaaagtgccacatacacaggctctacagccgttaaatttgcagcccaatcagtatcttggtgtggccaagtaagcataacagcatcttgctcagcccattcaggtaaaagtctaaatttcatgaaggtaataaacaaactaaggtggggctagtttagcattttagccatagatgtcagctttttgtgcgcgataaagcgtgatttttaactgtcttgcgaattgttttcttgttgacgtttttttagttggcgagtttgggcatgtaaggccgctcttacgactaaatcttggtcagcatcacgaatcgccgtaaacaataaggtatattggtatttatcatcatcacatttttcaatggcgactaattcggtatagcaataaatggcagatgcttcgtgttgtaagaataatttagtgcgaaatgtctgtccaagttcatatacttctgatgaggttaattttacaccgccaccgccatagctatcgcaatagttagcgtcatcttctggctgttcagaggctaaaatatggctcataattaaatcaattttacgtgattgtgcttgtaaaaatagtgctagttcttgtgcaacatcacctaggtttctaagcgggcgtaaggttgcttgctcaagctcatttacttcgttagcaagtttaaataaagcggggatatcagcttcgagttcagcattggtttttggcacagcttcaggttcaacggcgtataaattgacgcgattgctctcgttgatttgaaaaaattgttcaaattcggctaatttttgattattcatgctgcactccacacatctttccttaatactagcgctcgaagcagtaaattgctagtaatcaaataatcaaaaaaaagggcaaactcattgtttgcccttcattttttacaggttaccctcttgggttttgacatgttcttgctggtgatgttttgctatctcatcagcaagctcttgtcttgagcgtttttcagttaacttacgcgccgttaaccaataaaagaacagtggcacaaagaataccgcaaggaatgttgcagccatcataccgcccataacacccgtaccaacactatgacgagctcccgcacctgcaccagagctcagtactaacggcacaacacctaaaatgaaggctagagaggtcataataattggtctaaaacgtaaacgtgcagcttcaagtgcagcagtacttgcgctccaaccttgttgatgtttcatcaaggcgtattcaacgataagaatcgcgtttttgctggcaagaccaagtagtgtgacaagaccaatttggaaatacacatcgtttgtcataccgacaacccatactgctataagcgcaccaaatgtaccaaatggcagggcaagcatgacagacagcggtagtgaccaacgctcatacagggctgctagaatcaaaaataccatgatcacagcaagacctaaggcaattcctgtggtacctgaactgcgtttttcttggaatgcagagcctgtccattcgtaggtcatattaggtggtagtactgcttgtgcaatacgttctacctcagcaatggcttgacccgagctgtaacccggtgctgcattacccattagtttaactgctggtaagttgttataacggttaaggttttcagggccacggctatactcaatagtggtaaaggctgaaagtggcaccatagtaccttggttgtttttaacatagatacgaccaatgtcatcaggcttcattctaaattcagcgtctgcagacatcagtacttgccatgcgcgaccaaatttattgaagtcgttaacgtaataagtccctaagttacccgcaagggcagtgaacgcgtcatcaatttcgacacccatagcacgcgcttgctcacggtccacatcaacacgtagctgtggtgcatcagggcgccaaagtgtttgcaagccactgatgatagggcttttttgtgcttcagctgtcatcaactgcattgcatgttgtagtttatctgggtcactgtcacctttgttttgaatgtagaattcaaaaccaccagtgttacctaaaccaaaaatagcaggagggttaaaggcaagtacaagcgcctctttaatacccgctgttttcatgaagagctcttgcactagcgctttggtatcaacttcacgctcatcccagtgcttttgagtcacgaataaggttgcagcactgtttttgtaaccaccgccaataaagtcaaaacctgtaaacgccactacgttttcgttagctgggtttgattgtacggctttgacaacttgctgtgttacttgctctgtgcgttcaagtgatgacccatctggtaagaagatggcagagatgtaataaccttggtcttcatctggtacaagtgaaccaggcgtattttgccaaaggccaattgtagcagcaaccatacccgtcattaagatcacacctaacagaccacggcgcaccataaaaccaacagcacctacataacggccagtgatcttggtaaacatgtcgttaaaccataagaaaaaacgggcggtttgtttgtgttcttgttttaaaataagcacacaaagagctggcgtcatagttaaggcaaccacacccgataaacttacagcaatcgaaatagtaattgcgaactggcggaataactcaccggttaagccacctaaaaatgcaattggcacaaacacagagcaaagtactaaaacaattgccacaactgggccacttacttcgcccatggctttaacggcagcttctcgagcacctaggccttcttcgtgcataatacgttcaacgttttcaagtaccacgatggcatcatcaacaacaataccaatagagagcaccataccgaataaggtgagtgagttaattgagtaacccagcatatacatgccagcaaatgtgcctagtagtgaaaccggtactgcaagagtcggaataagcgttgcgcgccagttttgtaagaataaatacaccactaagaataccagtaccatggcttcaagcaatgtttttactacttcacgaattgatacctcaacaaagcgggttgtgtcgtacgaggttaaatgagcaagaccggtagggaactggcttttcatttcttcaataacactgtttacttcttcagccacatcaagagcattagcacccggctgtaagaagatacctagcagtaccgcttctttaccgttaatcgtccctttgaagttataatctttcgaaccgagctcaacgcgggcaacgtcttttaagcgtaagctactgccgtcagtatttgaacgaataatgatgttttcaaactgctcaggctcagataaacggccttgtgctgtaacactataaaccagttcttgaggagattgagttgttggcgtagcaccaattttacctgcggcatattgcgagttttgtacgcggattgcgccggcaatttcttcaaccgtaacccctaattggctcataacatcagggcgtagccaaatgcgcatagcgtaatctttagcaccaaaaatttgtacactcgttgtaccaggaattcgtttaatacggtcaagcacgttcatagtgacatagttagatgtccataaactcgagcgtgtaccatctggtgagtaaaaggcatgcacttgtaaaaagctagaagagcctttttgaacaacgacaccttggcggcgtgtttcttcaggtaaacgtgcttcaacctgttttacacggttatttacgtttacagcggcttggtcaacatcagtaccaatttcaaaagtaacttcgattgtggttgaaccagcactggttgacgttgatgacatatacatcatgccttcaacaccggtaatggcattttctatcggtgtagcaacggtttgttcgagtactcctgcagatgcgccagggtaggccgcggtgacttgtacaaccggtggtgctatttcagggtattgcgcaactggtaagctacgcatcgcagcaaggcccgcaagcacaataacaatagatataacaaacgcaaaaatgggtctgtctataaagtaacgagaaaacataagactccctgtgcttattctgcgtggcttgagttagtggttggtttgccaacattgactggcatacccgggaagaaaatacgtgccatgccatcaacaataacttggtcgccttcttttaacccactgcgaatcaaccaaaaattttggtattgctcgttttctggttttttgatccattcacctacagtgacaggggcaggtaacgcaacatccataccttgctcgtttttgcttactacataaacaaatttaccggtgccgttatcaagtactgcacgttgtggcacgatgaaagcgtttttgcgaactgcaccacttaactcaacgcgaacgaattgccccgggcgaagttggaaatcagggttagggataattgcctgaaactcactggtacctgtgtttggattaatacgcacatcagagaaattaacttcaccggtttgtccatataaagagccatcttgaagtttaatttgtgtttgccagtggccttgcttaggtaaagtgagtgagccatttttaacatcttgacgcatttgtaattgttcacgctcagataagccaaaacgaatgcgaatcggatcaaactgagtcatttgcgttaataataaatctgggccagaaacataagtgccttcagaaacaaactcacgacccattacacctgcgacaggggctttaacttgcgcatattcaagattaagttgtgcttctttcaaagctactttagcggcagctaaatctgtttttgcaatatcattggctgaacttgcgttatcgtagtcacgctgcgaaacagatttctcggcacgtagctttgctaaacgttttacatcacgctctgcctgaattaaagctgcctttgcgccatcaagtgctgcttgagcgcggtcaaccgcaagttgataaggttcaaggtcaatagtgaataatgattggccttgctctacacgttggccctcttcaaagttacgtgattcaagaataccggtaacgcgagcacgaacttcgacttcttttgaaccagataacgttgcaggcagctcgatagtaaaaggcacatcttcagttttcatggtcattgtggcaaccgcagcagggtgcatttgaccttgctgctcgggtgctttagagcaagcagataaaagtataggtgcagtaaccaataataaagcagataaagataatttggcaggtgcgaaaggcagacgcatgtttactccacagtccaattgttaagcaagtaagcaaagaaatgccatccaaaactcaaaggcagtcctatgcaattttaaagttcgattagtttatacccaaaatagcaaaaggtacaccctttagtttacttttgctcggattatatcgatacaaaaaactactttaatgaggattattaaaacgagttagcaaagtaaaccagtagaaatcatatttatctacttttgaggctttgttagtcattgtttattagatttactgtgatggtaagttggttatagaagtgtactaaagtcagcagtttgccttaaataaatgtaaggtataaatatgattttatttgggtatattaacgtgaggcacaaaattttaacaaatggcttgtaattaaactgaaatctcgtaccctaaagcaataaaaatataataaatgtgagttaaggatgacagatagaacaggtgtgatcaccgcttttactgagatatcgagcaagcttaggcgctttgtatcacgtatcgtcagccctgatgatgtagaagatattgtgcaagaaacgtttatcaaaagctatgaggccgatcttagacaaaatatagagtacactcatagttatatgctgaaaacggcaaaacatttagcactaaaccatattgctaaatgggataataaatataaagagtcgttagatgaacaacaacaagttgagcatcaaatgcgctcaatggccttagaagatgaagtgacctcaaaagaacgctttttgtttttttgccgagtaactaacgaactaagtccgcaagtaaaaaaatgctttattttaaagaaagtctacggcctaagccaaaaggaaattgctgctaaaatggaactcagcgaaagcactgttgaaaaacacatagccaaaggcttattacatgttcaccgagcaatgaaatctcacgacgttcaaacccacagtcaccctacaaccacagagttcgctgctaaagaggtgaacaaatgagtaatgttcacccgttttcatcaaaagaaatgattcaagagcaggcgagtcagtggataagcgccattgaccgtggtttatcaaaagatgaagtaagccaattacatatgtgggcccatcaaagtgctgcacaccaagaagcactttttgagcttgcaaccttgtgggatgaaatgagtgtacttaacgagctaagtagcctatttccttacaaagcaccacaaaaacaacccgcagtatttggcatggcaacagccgccagctttttaattgtgatgctgtttggttgcattatgttgatttattctagttattggcaaagtgaagagaacgattacgcgaagtttaataagatttaccggacaaaagtgggtgagcaagctacattcgtcttgccagatagcacgattgtacaacttaataccaatacaaaacttgaggtggcttatacgggaactcgtcgccagttaattttaaaccgtggcgaagggcgttttaacgttgctaaagatgcaagccgtccatttacagtgatcgcgggtgataaatcttttactgcacttggtacagtgtttaatgttcagcgaaatactgcatcagacttagaattagtggtcactgaaggcaaagtaatgattgccgatccaaatactcatgttgatgcaagtgactttgacagattaaaaagtgcttcagataacagctctgacataaaaaaactaaaagcgaatgttgttatatctggtgaaaaagcgctgattaaacacagtaaaaccgagccaattaagcagctttcagcagatgatgtgcaacgcgatcttgcatggcaacatggaatgctgatctttagtggtgaaccattaagcgaggcacttcaagaagttagtcgttatacagcaacgagatttgagcttagcgatcctgaacttgcatctttgaaggtagctggtgtgtttaaagctggcgatattaaaggcctacttgattcactacaggcaaatttgtcagttaatcaccaacgtttgggtgagcatcgtgttagcttaacgttcgctgcaaaaggttagttctgcctatgagaatacgccaatattatgatgttaattgtgcgccactttctcgtcacaaaaaattaattaaaaaaaagttaaatttacatagtggatttttttccctcacctgtttgtttaagttgcacagtaagcaattgcagttgttaccagcctcatttgttgtttatggccttaccgtcggccaaacagcaattgcagctgaaaaacaaatgctgcaatttgacatcaaagcgcaacgagctgatttggcgttaatcgaatttgcaaagcaaaccgaacaaacagtcattttttctttcgaattagcgaagcaatatcaggcacaatcgttatttggtttttacactaaactcgatgcactgaatgcgatgctagaaggtactgagcttgatgcggttgttgatcaacaaggcttgctgaggataaaactcaaacaagtagataggaaagataacaacatgatcaaagtatcaggggtcagcgctgcagtcgtgccattactgctagccgccaatacgcaagcattagcagaagatcaagcagcagaacaaaacatcgaaaaaattgccgttgtcggtagccgtgtagcaggacgctcggttgaagatttaccggttccggttgatattttaagtgccgaagcacttgagaatacaggccaaacagaagtaggccgtatgcttcaagcaatcgctccatcgtttaacttttcaagctcgtctatcagtgatggtacagatgcacttcgcccagcaacattgcgtggcttaggaccagatcaaaccttagtgcttatcaacggtaaacgccgccatcaagcgagccttatccacattaatacgtcagtaggtcgtggtacggctggtactgacatgaacgctatccctgctgctgcaatcaaacgtatcgaagtattacgtgatggtgctgctgcacaatatggttcagatgccattgcaggtgttatcaatatcgtattaaaagacgccgaagaaggcggtaaagccgctatcaactacggtgagtattcagaaggcgatggtgaaacggttactgttgatttcaacaaaggctttgctttaggtgatgaaggttatcttaacaccacaattaattaccgtgaccgtgcgccaactaaccgtgcaggccttcatggctcatgtcaattttacggctgtacagaacttgatgacggtacgctattagctggcgatccgcgtgagttaacagcacctcgtgatacatttagaatcggtgatgcagattcacagcaatttgctttaacgattaatactggctacgaattagctggtggtgaattatatggctttatcacctattcaaatcgtgaaaacgaatcagcagcgtttttccgtcataacgcaaatgcaaatggtaacccagtattacaagatggtgatgcaaccattcctatgggtttcttacctaagattaataccatcattgatgacgtgtcttacaacgtgggctttaaaaagtcgtttgataatgattcaagcattgatttatcttacacctacggtgaaaacagcattgattacacaacaagcgacacaatcaatggctcatacgcaaactaccttcgttataaccaaggtttaagcgctgatgaaattcgtgccactatcccgcgttcagcgtatgcatatggccttgaattatcgcttcaaacactcaaccttgattacactaaagactacgacaatttttcattagcactgggtgctgagctacgtactgatgagttccgcattcttgaaggtagtgaatacgcataccgtgattacgacacagttgatggcgttagcatttactctggcttaaatggcggtgttggtagtgttgatgcagcaagtggtacgcaaggttttggtggctcagatccggcatcatcagttgatgagtcgcgcgatgtgatctcattctacatggatgcagaaacctatgtaatcgatgatgtcatcatctcaggtgcggtacgttacgataactacaaaggctttggcgatacagttaactttaagctagcgggtaactggtcaattactgaagatgtgtctttacgtggtgcactaagcacaggttttagagcaccttctatgcaacaactttactttaataacgtaagtacacagtttgttgtgggtgatgatggcagcttagtcgctgagcaagtaggtacgttcagaaacgacagtaccttagcgcaatcaattggtattcctaagctaaaagaagagaaatcacaaaaccgcagtttaggtattgtgtataacgttaccgacaatatcaatttaaccattgactactactcgattgatatcgacgaccgtatcgttatttctaaccgtttaggtaaaggtttatcagatacgctagatgctgcacttgaaagctcaggtgcaggtgcgggccaatttttcttaaatggtgcagacacagaaacagaaggtgttgatttagttgctacatggaacacagaaggccttggcggtacgcttgatttcacttttgctgctaacttcactaaaacagatgtggttgatttatttacgccatcaggcagtggccttgagactattccggtagaagatgtgttttctgcgcaagaaacatcaattattgaagaatggcaaccagaagaccgcattaacttaagtgcgctttatcgtttagaagattggactgtaaacctatcactaaaccgttacggcgaatacacagttgaagacggtggtcgtcaaacatacggtgctgaaatcttaactgatgtaaaagttaactacttctttaacgaaaatctgtcatttaacattggtgcaaataacttatttgatgtttacccagataagaacaccattggtaattcacgctcgggtacgattgttgatgcaagcggcaacacaattgtttcaagcccaggtgtattcacttactcacgtcgttcagcaccatttggttttaacggtgcgtactattacgtaggtgcagagtacaagttctaaactccctttagattcttttattatttaactttgcaaagggccatttggcccttttttaatgcagtcataaaaacttcactttttttatcaacctaaatccctaataataactggactagaccagatttaggcgatattaaaatgaatgaatacttactgttaactcctggcccattaacaacatcggacactgtaaaacaagcgatgttaaaggattggtgtacatgggatgacgattataacttaggtgttgtacaggctattcgcagcaaacttgtaactttggccactaaaagcaatgactatacgtgcacattaatgcagggcagtggcactgcgagtgtagaaagtgctttaggtagtttagtcgcaaaagagcataagttattgataataaacaatggcgcatatggtaaacggatggcagaaattgcccagtatttaggcattgaccattgcgttataaattacactgaaactcagctaccaagctgtgacgacattgaaaaaacgctcttgagcgatgaaaaaattagtcatgttgcaatggtgcactgcgaaacaacgactggcatgctaaacccagcaaagcaagttggcgaactcttatcacgccataacaaagtgtatattttagacgctatgagcagctttggtggcgtaccgtttgacttagcagattggcacattgatgtaatgataagctcatctaataagtgtattcaaggtgttccaggttttggttttgttatttgtaaacgtgacttaattgaagactctcagggggttgcacgttcgttgtcacttgatttacatgcgcagtggcggtgtatggagaacaaccaaggtaaatggcgtttcacatctcctacacatgttgtacgcgcatttcatcaagctcttattgaattagaacaagagggaggtgttgcagcacgtcataagcgttataaaaacaatcagcaactcttagtgactgcgatgagagatttaggttttcaaacactcttagatgagagcttacattcaccgattatcacctcattttactctccaacagcaagtgggtatgactttaaagagttttatttgttgcttaaaaaccaagggtttgtgatttacccaggtaaggtgtcagatgctgactgctttagaattggcaatattggtcatgtgttcgaaaacgatattacacgtttaattaaagcaatatcaaacagcagatattggttataaagaatgttcacccgtgtaaaggctttgtttaacaaagccttttttcatttattgccttagtgaccttcgacagtcatttcaatggcattatgcaaccaatactcaatattgtaatccactaaacttcctagttcatcaaagcgtttacgaataacttttaaacagggagtaccactatttttttgcaatacctgtgctacatcgtcaggaaggacagtaacactaattgcgcactgctcattgactacatttgttgcgtattgatttgccattatttgtgttatcgagccatttaggttgtgctcagcaaggccatcaaaacgcgcagcatcacaaaaaatatcttcaaacatcactaagcgctcatcaaggctgcgggcacgttgcaaatggtgcaaagttgatgcagaaaattctgcttttaaatcatgattgctaatttcttgatggctaatcacttgggtatcagcaacaaagccttgttgttttgccagttcataaaagtttactttagtggcaggattccacttaagttttgttggtgttacaaaccaaccacggcgcgtttggctatagatcaatccttcagcttctaaacgaagtagtgcctcacggactgtaatacgggtcgagtgaaattgttcttgtaacaaacgctcagaagggagcttgtcacccgtgttcagagtcccttcgcttagtaattgatgtatgtaatttctgatttgttgatataaaagcataccgtgcctttttgctaaatacagctttagcttaactgataataaaaggatttataacgtttgattatgaaattaaatagttatctaagtaatctagccaaaaagaaagtggttcaatatgcatatttggatcttttgcacagtcgtcaagttctcttaattgtaaaatttcttcaaaatatggctgggctgcaaattgattagcttgttgtaacgacaaagggccaccttgttgttgcaaggtgagtgtactggcaggcgaaagtgtttgctcataacctgcattctttgcgactaaatagcgtttagcttgaacatgttgagaaaccatggcaacgacagcagcattaaagttattttcttttaaaaaaattgcgccaagctcgcagtgattcacatatccttgcttggtcatcgtgagattttgctgctgtgcgattaaatgcccaatatcatgtaaaaatgcagcaacgatagtatcagcgcttaattttttccgcaatgcaagcccagcgcactgggctgcatgagaatactgggtacaaatttcgtcatagtgttgatagccaaactgttcaaataaataacggatccgtgtgattgtttgttggtgtgtaatggtcatctaaaaagctctacgatttcatatcaacttttcctgcgctgcctatgaggctggcaagatacgtatctattggatttacctgggtgttattgtcttctgctcgttctttacgtcgaattgcattacgaattaggtaagcgccgacagttcgaaatggttcaaccacaaagttgtctaatgcttgatttacaaggccacagtgttgccaaacaggtgcattttttaaaattaaagcacacagaatatttgcccctaaaaaagactgtacgacgccattaccagaataacccccggcgtagataacatttgcttgattattcaaatgtccaaaaaacgggaagccagtgacacttcggtcagaagggcctgtccaagttcgatcaatttcaaaattatggttagggaaaaagtgtgataaagagttatttaatagcgtttgatagcgactcggctgctcaaatttatcactcattctgtttgcgaagctaaaataatttccgcctttgcctagcattaatcgaccatcagtagtggtgcggtaatagtttacaaaaatacgggagtctattattgcagcaccatgattgagacttaaaagcgcaagggtttcaggcatcggtttagtaattgccatatcgcttgaaaccagcacgatattgcgttgaaactgcggcttaagggtagggagccacgcattaacggcaaatactagatgattagcacaaatattaccttggtttgtttcaacatttagaggggactgtccactatgtgctgtgtactggcactgttcaataattgtaacgcctaaactttcagcgacctgttttaaaccacgaactaattttgctggctgaatactaccaccatgaggtgaataatggccgctaatattggcggctgagcctgtatttatgagtgtttgagtatcacagtgttgccacgcattaagattgttatcctcaagcatttttattgcggggtctaacaagtgcttttgtgcttcatttgaggcggtgtaataacagccatcaattcgacaatcacagtctatgccatgctgacgaacaaactctgcaatttgatgaaccgctgactcagactctttgactaaaaacagtgccttttcgagaccaactaacttacttaaactgggcagcttagttgaccaagttaacattgcaccgccatttctccctgatgcaccttgcccgcaaaagcctttttcaatgatggtaacttttaaattagcttgttgctgcttgagtttgatagcagtccaaagaccagtaaagccaccacctatgatacatacatcgcaatggtgctttgtaggtaatgaaagaggaagcgcataggcttcctcttgcattgcgttatcaaaccaaaaaggttgaaactgcattatgggcgctcccctcggcttagcttggcatcaatctccatcaaaacagtttcaatatcagccagcgagtcaaccacgaaatgcgtacctgcagagtacaagctttggtaagcttgacgtgtcagttgctgcttttgttcagcactacacgcttgccactcttgttctgttaagccaaccgcattaccgcttaatgcgaggccaattgtccacattccggcattcaaaccttcttcgatgccgggggcagaatcatcaattttgatacagttagcgacttttttaatgcctaaagcatttacattttcaagcgccatccaagggccaggacgagaaccggctttaatgtcgtcacttgctacccaatgatctggttgatagccatagtctgcagcggcactgactaacacttccataacttggcgagggtagcccgaacaactgcctactttgatgtcttgctgttttaagcgattgatcacgtcaagcgcaccaggaataggcattgctctgtctgctacttttgctttttgcaatggcataaaagtttgatagatgtgatcaatatctgcttctgacattgctcggccaaactgagagtgccagcgtgaagcaactgactccaactttccaagtgtggcaatgtgatcccattttcccatacccattggaatacgcgcttctgcaagtgaaatctcaaagtcataagcttgtttaaatgcttcaacaaaaatggtggtgggggcaactgagccataatctacgacagttccagcccaatctaaaatgatagcttctatgtttttcataagattctcttttaattgttacaggtcacaacctgttttgagtgatgagttcgaataggggataaacgtactgtgaaataacacagtgaacatgcaactaaagcggcggctacaatgccaactaagtaacaagcgttaataaagaagttaagccaactgagctcaggcatcgcaaatgttctgtacagtaaaatactgacagagccaagatagcctgcagaatcagcaagataaattaaaaaaccagcattagcgacggagccaacggctgaaatcattcggtcaaatagaaaacagttatacgggatgtaactgatatagagacctgaacccagtaataccatccacgcttttgcggatatcaagttagcttcaaaagcaaaggtactcgacaataacaaagcggcaccgaataaaataaagccgtgattgacataaaatgcggttttgttgttttttaccaaaaccatcgcacctaaagcgataaggacaataaatgacattctgatccccgcgtaggcgaaaatggctggttcctcaccatggccaagagcttgccaaatttcagctgcaaaattatcacggaaatcacgaaaaccagtaaacagcatgaagcttaaaatgaggcagctaataccaaaccaatactgtttaaaaaattgccaacgggctttgccatccataggtaagcgtttttgtcttgcttgttcgtcctcaattgttggttctggaatgagggttaagcatttaacactaaacaataacagcgggaaaaatagtgcacctgtcgctgcaggcatccaaagctcaggtacatttagtgtatcaataagccatttgcctacacttcgaacaagccctgacgccaatataaatgtgacactcaaaattgcgcctagaatttcactggtttttcttccttcaagaaaactaaaaacaagtccccaaatcatgcctagtgagaggccattaaaaaatagccaaataatgtttaacccaatcggagtgatagcaaataaaaccagcgatatttctgcagcggcaataaggccaataattgttaaacctcgttgctgatgttgcatctctgaaataacttttatgccaataaatttggcgcataaatagccaaaaacttgcgccaaaataagagcaattttaaagcttacctgccaactcggatcgtcgaattcagtgtaactatttgcagtgaatggcttacgaaatgcgtacatagaaaagtaagtgagaaatgcagcactagctgcaaataacacaaaaccggttccttgcgcacgtttaagccaattagggtgtgaaaacattagatatcctttgcggggcaatggccccgcatacaactcaaagactgattagaactgataattaaagccaaccatgccgcgtacaccgtagtactctacttgtagagggcggctttcatcgcctaggtagtatttaagaggctcgttggttaagttattcagttcgaggtagactagtgcgttttcgttaagctgatatgacgtcgtaaaatcaacgcttgtattgtcgccataatagctgtcaaattgtttgctgctgccatgctcttcaatgtattcacctttgaagttaacggctaatcgagctgcaaaatgtgtgttatcgtaatacaccgtaaagttgtagagactatctgcttggcgaggaatggagactttgactgcgcgatcaggaatcgtcatttctgaatccatgaaggttgcattagccatgatgccaaagttatctagttcaggtgttataaaacctaaatcacgattgaacgccacctctaggcccgcaagccatgcgctatcgccattttcagggcgaataatattaaccccagtattattgccgaactctcctatagagctactttgaaaaataggatcggtaatgtctttataaaatatccccagagaaactaaccctaagcggtcaaagaagtattcagccattaagtcgacattatttgaataagtcggctctaaatttggattaccagaagttaattcgttgtctgcttctaagtaagtcgcccctggagttaatgagccaaagtcaggacgagcaaaagagcgagttaatgcgagtcgataattggtttggctgttagggtggtaggttaaatgcaatgcaggtaacacagacaagtagtcattgtttgctttaacgctttcgactttatcttcatctgcaaggtaaatataaccgtcaacttcggtgtctgtttgagttaaacgaagacctgttagcatttcccaattagcgttaatggtatatgttgccataccatataaagatgtatgttgttcattaacatcaaagtttctgccaagtgctccaccattttcgattaaagcagattcactcttatcaagcacaaacttgtctttattgttattccaaaaatttgctaagtcatcagtacttgcaacttgcgaaaactgactttgataatcgtaagaaagctcgcttaaatagttactttttcccggttggtccgctaatgtaaaatcactcagagtaggggctgcgtcatagttttcagtatcccatgcataaaattcatcgctgaacctagcaacgcgttctttatcgcggaattttgcacctactttaacaataaggtcactattgagttgccactcaaagtctaaagcggcaacaattttatctttttcattcaccttaattttataaagttcgacccacgataagcccatttggcttggatcaaacgaaaagccacttggtagatgagtactgatttgatcccatggatctgagccaccatcaatcgtgttataagcgtagtttttacctgtatctctgtcttcaaggccttcgtaaccgacatttttttggtcaaaccgaactacaaaataactgttatcttcgctgttaggtgtgttgccatacctaaattcgttttcatagctagataaagaccaatttaatgttttgtcgtagccaaagaaatgctcaccagcaaactcaaagccagtcatttctgttatgagctcatttctaatatgttgtagttctgctctgtctttatcaaaacgcatacgatgcttatagtgcgtttcatcgtcgattagtgtgccgtacatggcactagcactaatattgccttgttctagctggtattcaacagaaccatttaaaccgtaagtttcacgagttccggtgtaatctcttagctctaaacgataaattcctaaaccatcatttcctcgacgtggttcaaagttatctgttgcccagtcgcgttgccaagctgttgcgttaattaaaaaacctaatttgtcatctaagatgcgatcgccataaagtaagttggcagagtagttattgccatcagctagttcattttgaccgagtgctaaattggcattaaatacaaaatcatcaggtgcttttttggttataaagttaacgttaccaccaatagcatctccctccatttctggcgttaatgcttttgatacctctacaaattcaataagctcactcggaaaaaagtcaaacgcagtagcgcggctggtggtttcttcttctgcagttggtaatcggttgccattgatagttgcagagctccactgggcaggtaaaccgcgaacagcgacaaatcggccttcgccttgatcgcgttctatagaaacgccggggatgcgctgaactgcttcagctgcgttacggtctggcaacttaccgatgccatcagccgaaataacatttttaatatttttagcatttttttggctattggccgcagccatttcaccacgttgaatttgaccaacagcaacgacttcttcaatggtgttagctgaattatccatcacgataggagacagtaatttaacctcattgttgcttatctcaacatcaacaatctggctgctataacccatatacgaaacttcaagttggtagcgacctgcatctaatttagcaagctcaaacttaccgtcataatcagtcaccgtagattgatttgtgccaacgactttaaccaaagcacctggcaagcgattactatgatctgtgatagagccttgaatttttgcatcagtggcaaaagcgctatgcgctgataaaaatgggtagctgcacaaaaaaacagctgtgctgagtgtacgtcgtttaatcatctgttgagcctcttatttttaaatccatctggactagaccagattttttgcagacaataatagagatgcttttttacaaagatgtgacggttttttatttttaatattaaaaagggtcaaatgaccctttgagataagttataaagacgtgcttatagaaattggcacatctttatattgttttattttatcaagcaaggttactaaggttttgtggctactttgctcacttgctgttacttgcacattggtcatttcaaactgtgcggcaaataacgcaagattagcaattatttgctctggtgtgataagccggtttgcaaagtaaatactgtcgttttcagtgatagtaaattgtgcttgttttttcgggttttcaagacttggttttgctaaagggcgattcacttcaatagcgcgttctttaacaaatgaggttgtgacgataaaaaatatcagcaagataaacacaatatcgagcataggagtcatatctacatcagcgtttgcagtggtttttttatgttgtttcaccataattagatccttgttgtttttgaccaagccgcaaaatttacgattaagtgactagccataggcgtgttaagaacacggattatttttaaaatgctgggcgccacagcagtttttaggatcctaaatttaaagttagcagcttttaaaaatactgtagttaaataaatattctaagtttattaaatgtttgtagcgtttttgttggtaaaaatatttattagctttgatgaaatgattttgaggttagtctggtcatttttgttggaactaagtttaaaggatggataaatgctaaaaattaagtctttagtttgtgctatgtgccttgtattaccaacagcaagttttgctgaggagccagtaaacgggcaagatttcataaatttatttgagaagctgtcaggtaagcagcccggtatcagaaaaggtcatgccaaaggggtgtgcgctgttggcacatttacacctaatcaagcagcaaaacagtattcaatcagccctttatttaacgcagcgtcaaaagcaaatattcgcttttctatgggcggtggtaaccctcatgctgatgaaacatcacgctcgccgcgtggaatgggggtgcagtttgtgctagaaaatggtgatgtgcataatattgcagggcttactacgccagtatttgcaggtaacagcccagaagctttttttggcttgcttagtaccttagtacctgacgaaaaaacaggtcaaatcgattttgctaaagtaaaagcatacagagaacaaaacccaagcaccttagggcaatttaattggctacaaagccataacccgccagcatcgtatgtgtcttcgcgttattttggtgtgcataccttttacatggttgatgaaaagggcgctaagcatgcctttagatggaccatggtgccagaagagccagaacaggtgctaactgaagagcaaatgaaaacgttccctaaatcatttctggctaatcgacttgaagaggatttagcgaaagggaaggtgcattatcgttttcaagcagagttagccgagcccggtgatgcattaactgacccttcagtccgttggcctgcggatcgcaaaacaataaatttaggaaagctcaccatagaatcgacaggtgagtcaggctgcgatcttactaattatgacccaaatctactatctaaaggctttatgccaagtgatgacaaagtacttaaattgcgctcaacagcttatgcaatttcatttgcgaagcgtttaacggggcaataactcttaattgtatctgtcaggtttgtttaaaaggaattaataaacctgacaggtgtatatgtgttagaagagacagtagggggaatttagtttgtcggcagtattagatgagtttctggtaataatttttatgggcttaggtcctaatatacgactaaaatttatttgcaaaaaagtgtagataagcgaaactaagtaaactttttagtcctgtttgattggtttgttagccatttcgtgcggaagagatacaagtattgaaagacctgtaccctcgtttatccattcattacaagaagtaatcatttctgtatcagatggcttgtcagtataaaattgagcgccatgaatgaaagtatgaaaactatttacttttaagccatcatcacaacgtaaactatgtttgaaaccatccgttggcatcattgctccaaaagataacataatccaatggtccgatcctgattcagtcatatcaagagaaatgtctaaatgggaacattttttagcgtgttttgataaatctatagtggcaattctagctttaccaacatcaatttcaacttctttaaattcgagcgtttcaaatacctctctatcaccatgtggcgtatttactacaatttgattacatgtggaaagtatttccgaagctaaaaaaccaactttaatatcactatagccatctttagtcgggtacaaacgatagctaatatttgagtctacacaaatagtattgtgttctttatttaaataagctcttgcgtgaacattgtaattacttcttacacatttatttgttacatccatagtttgaatgatatatgtatttaagtaatcttcgatatttgaataaattcttttttcttctatcgatggttttattaacgcgcttaatgcgtcccgtttactttcagaatcaatattccctaaaaaattcctgcttactacaatatcttgcaatagtgacttgattttattaacaaattcagaggttcctgatgcataagtaaagattgaggcgactaaaatggctatacctacagactctagaagtcctgtacatgctaatgcccaaaaaggcatattaggaaactttaaatctaaaataacagaaaataaaaccaaaaccaaacctagccaaaaataactagagaaaagcttggtaaatccatagttgttattagttttgtattccataatatataaatccataaaaatataattataatattgcgttttgattttgatttaaagcttttttatgatgggtttatttttaacaaaattttgttttttgtaaatgatgagttttcattggtgcttaataagttaattgtaaaaaaattatcgaagcaagttttatttattatattagctaaccaaactgattttagtaaatatcgatgactggttatcgctcgaaacagatcttaaaatatttgaaataaccctttgcgtggcagttacgaatcatacttgattgcctataattggcagttagacgaacttcggtagagaacgaacagtgactaaataaatgcgaattactaagcggctaatgcaactgtataaagtcaattagttaacttctttcactgttcaggctaaaggtcttttaagcgtgaaaatataattattaatgtagccaaatttatgtgtatggatacattacaagcgctgagcattacagggagctgtagcataaacaacacccacttaaccaactgagcatgtagcaactcagctcaacaaactattatgcaacgcaaacaacgtgtcgtataaataccataatgttaggtatacaaggagagtttcgtgaaaaaatctatattagtgttcatttgttttcttttttcatttaccagtaatgcaaatgaccaattcacttcagagcaattaattgagaaagctaaagcatttgtagcggcaaaaatgcgcgtcagcagcccgacacaacaattaaagaagtagactactttatctcgttactagctgatgatttcattgatgaacacgtcaaatataaatttgtttattcagataaatcaaaacttcgcgaggatatgataagtaagctaaatgatgaagttatttatagttcaatagaaataaatgagattatggttggtgctaacgtagttttggtaaaaatgactgaatcaggtaaagttaaaccagctcatttagacaaaactatcaagtacaataaaaccaatattgtttcacttgagtttaatcaattaggcttaatcaaacacattcgtcgacatcatgggtaattgagacataataagataaaaaatgataaatctgtcttaaaggtgattagatttttgtccctcagtgattttagctaacattattacattttctatgatgtcgttatgtcttaagtgattaatatagaaatctctaaaattagtttcttacatagctttcagtgagtattacagcagtgtataggctaatggagcaaggtttagtaatagtaataataaattacttaaaggaagcaaagtgagcactaagcatattttattgattatcattattttctttagctcaggctgtactacatcgggtcagctttattatgttgatactgaaggtcataaaaagcttgcttacgacgtagaatttattggtatgcctagtgtcgataaatttgctgttgaatatgctttaagcctttgtgccaaaaatattgttaaaaaaggcggtgtaataaaggaagagcatcttttatcgattgatacagctattcccttagctccgtgtgaaaaggcttggacacacgaactagctaagcagcaatatcagtctaaaaatttaacgaaaaaagagtatgggtatatagtttcaaatatagatctaggtttagctacagtaaataagtgcacataagttttttaaaagaaatataatgcgtggtgttttatctttttttagttgagtgatttggagcgtgcttaaatattttaatgtattgctcacgatttaatgtgggattatttttacaaggagtgtacgatgaatacttgggtatttgcagcaggaatcgtatgtatatttacttcgattgtgcatatcttcgcaggtcaagttgatccagttaaaccttttctaaagtctaatcttcctgacattcctaaagcaactctattagggtgttggcacattgtatcaactatcctcgttatctcaggttttgttttatcatatattggttggttcaatttagggttatatcaaaacattgtcattggaatatcgataagctttgtcattttttcttgtgtctttataactgtgggttggtatttttttaagtatcatacattcgtaaagttgccgcaatggactttattgttacctattggggttttaggtctggttggagtattgtaagcatcataaatgctttagctgcaaaggatataaaacagcgggcttgccctcctacgtatttaatttttttagcctgctattctttctgtcgattacggcgttggtaaaagagacttaaatggaggttccataaggtatgaatatttttctgattattgcgggtgcattaaatgctttagctgccattcttcatttaggttgtatttattttggtgcaccatggtatcgtttctttggggcgggggagagaatggcgttactttctgagcaggggagtatagaaccaactttgattactactggaattttctttgtactctccatctggtcaatgtatgcgttttcagctgctggagtaatatttaaactcccgttaattcggactgttcttatattaataacgttaatttattttgttcgtgggatagcaggctttttctttataaactcacctatgggacgctcacctgagttttgggtttggagttcgataatttgcctatctttaggcatagttcatttaatagggttaaataagcaatggtcttctatgtgaacgacgttaacctaaaaaactattcgcaattcgtgacattttttccacgtactgattttaatgactaatttggtgttcgacaaaccggtattgctattccaacacttcaatagggcgttacttgtaactggaggcttgagtgccaaaagttggaagtaatatctaaatctaaacagataaaagcccagcttaactgggctttgcactctcacaatttaatgctttttcattttactcatttcagcatgacaactttgaattgtcagcaaggtttttgataacgcggcttcacaatcatggggttgtggttttttaagcgcatgtttgatttcagctagtgttttatcttcaacttcttcaagttcgctaacataggtggcgtttttgtcggcacctagtttagtaattagtgatgtataggctttacgtgcttctacagcaaagtcagagccattttcgcgctcgccattttcgttaatagcataaggttgtaagcgctcaacacttactttacgcgcatctatcatgcgttgaaataaggcaataatgcttgggtcggttactttttcctgagctttttcataaaaatcgataccgctattcataacttggatgatatctgcaatatgatgaacgtcttgtccttgatgagtattcataatgacctctttttgaatattaaaaacaatgcaattagatacttgcaaagcatattccagttcattacttaaatataaagttgatttatttcaggtggttgttggtttttaataggaggggtactgctgataagctaagctaatactttgcttatcagcaataattacaatttggtgggtaaaatcttacttaagctcgtcggccacttctgcaaccttttggcgtaaccaaatatggcttgcatcacggtgtaatagcgggctccaaatcatatcgagctcaaacggcggaatagggaatggcggctcaagaattttaaggcccggatcgtctaaataaatatttgcagcttttgagggtaatgttgcaaccaagttttgctctttcgctaagtgaatggcaacgtggtagttacgggtaaaggtggcaatattacggtgtttaccaaagtgagcgagcgcctcatcgacccaacctagcttttgcacatctttcggatccataccaacgcctacaccaaagcctgttttacttacccagatatgacgcgcttttaaatagctgtcgaggctaaagtctttaataatcgggttatctgctttcactaggcaacaaaagctgtctttccaaatttgcttatagtgaaacgattgcggtaagttttcaaagcggttgatagccatatccactttaccgttttcaacatcgtggaaggttacatcacttggggtcaaaatatcgagtgtggtatcaggggcttcttcgtgtaatttacttaacaagcgtggggcaagggtacttgctgcatagtcactggccatgatacgaaaaacacgtttactttgtgatgcctcaaactcgcggtttggtgcaagtgtttcttcaagggtcattaatatgccgcggatcactggctgtaactcttttgcacgctctgtcggtaccataccctcactggtacgcaccaaaatagggtcgttaaataaattacgtaagcgttttaagccattactcattgctggctgggtaatgctaagctggttagctgctttggttacattacattccctgagaagagtatctaggtaaacaagtaagtttaaatctattttactaatattcattctgtgtccttggtgtttaccaataatggataaatcgttgtgcagcagggtatgggtaaatatggcttactacaccttgcttaaagttgtattgtgcttgtcgccaataggctggatcttcaagctctgggtgtgtactcaataagtattgcttatacaccgggtttgctgtcacaaaggtacataattgctctggaaacacatcttgtggtgctacagagtagctttgctcattagttaggtaatcatcgtacgttttggctttaggtaaggcacgaaaattcatatcggttagatactgaacttcatcgtagtcataaaaaataacgcgattatgtttactcaccccaaagtttttcaacagcatgtcgcctgggaaaatattaacagcgatcatttcttttaaggcttggccatattcttctattgcctcaaaagcttgttgctcactggcattttcaagataaagatttaacggtgtcatccgtctttcaatatataaatgcttgatgattagccattcgccttcaataatcatcgaagaaccaatcgttttatgtaactcttcaagtaatttactatcaaatcgagcaagtggaaatacgacgttcgaatactctatggtatcggccatgcgaccaacacgatcatgactttttactaattggtagcgttttaatacggtatcgcggccaaagggtttgctttcaccaaaggtgtctttaattactttaaatacatagccaaacgagggcagggtaaataccatcattaccatacctggtgtaccgggggctataacgagctggtcatttgaatgatctaaatgacttaaaaactcacgataaaattcggtcttaccttgtttatgaaaacctatggcgttgtacagctctgccagtgttttattaggcataagctgatttaaaaagcgcactaacgcagatggtgcatgggtttcaaccataaaataagcgcgcgcaaaaccaaagataacccgcatttgtgatgatttggtaagtagggcgtcaaggtataggccattgtcttcgtggtgcaataccgcaataataaatggctgtacgccactttctgaaacgacccggccaacaatataagcggctttgttacggtaaaaaggggcttgcagtatatcaaagcgcatttgccatgcttgatgatgtgtatcgggcgcttgtttataaaaggcttttaccagcaagcgaatatcgcgttctaaatcaacaaagggagctttaaaatcaaactggttaataattttgcgaatagtaggtcttaaaccatccacaaccgggtggtaactacggtattcggcttccattggcaatgctggggcatctgctagcgttgcttttacaaatataaagtcattattaaaataacggcgatggaataaacgacaaaaaactgagttgtaaaaggtttcggcgagttctgcttgagggtgaaagcgcaaaaattgctgataaagttgtttggtttcaagccagcaggtttggtctaaggtaataatttgctgttcattaagcgatttgagcttagcaatggtttcgttaacccgatcatcgtaatggctaattctgagtttgcttatttcatttattttttgccaatcacgctgtgcaaacgcgagtggtgctttagcagtaattgcttgaaagagtttatagtgattgcgaaacccagataaaattaactctgcaatgtgttgtggctgcatataaactccttacttataccaacatagagcaataactctataggtgttaagaatatgttatttattcttcaaacccaatagtaaagtgtatttaattatatcgagcgagttttttctctaagtttacgatttttttgttaatgtttttcacgtctcgcacgtattgcttattaattgctttaagctgtttatttatgtctttgttaatttctttcgctttcttatctgacaaccttttatttaagcgttgttcctgttgatattgcgctctatctcgatcgcggctcaaaatatctaaacgatacttataactacggatctctgcttcgagatctctaataatttgctggcgctctaattcattcagctctttaacataattattaggtgctttaatgtcgggatcggtaacgtggattttgtgcttggttgcacggttaccgcaggggtattcactaaaaacggtgcctctgtctgtgacgcacttatagtattcagttgttgcagcaagtgatgaaagggagcaggtcaacaaacaaactattattgaaaaagtgattatagttttcatgacatccatgtctccttaatcagtaatagggctctgtgtgggtatatttaaaactagctcgtaaaaatgatttatcaataatcactaaggcgtataacgttttagttttttaatactttgcaccaaaaacgggacatcaagtctttgctcaatcgcaaaaccttgtgcagcagaaatatttttaaaattaccatcagagtcaatcagagtaattcggtctttcttaaaggcaatgaaaacatcttgagaatagttaacaccggtatcatcatggcgtttatataaattgcttcccagcatagtttgctttgcgagcgtattacagctgaaataatggccaacacttgtggcaatgatatcgcttggttggataagaccatcagtttgcaccacttttttgtctgagctgtataagcgtgaggcagtgacaataccattgctgttattagctaaactaaaggcaaaaacggcatttgctgcttcacgtgggcgtgtagtttcatccgcgcgaataagacgaatagccggatttatatcttcgttgttaataaattcgaattgttcaaaaccattaatttgcattgagcgattatctgcaagccaaacagggagttgctgtttgtctagaatcggggctttgtaaaatgctggtaggccgtacactaaactaaataacgtgtcttcagcttcgataggttgtaagaataagtctgtcttacgcagtgcaggttcagtgctaacaaattgctcaagagcgttattgttttcaaataccaaaatatcaattgtggcacttgagtcagccttacattcagcaagtggagtaggtgctaagtaatctatgttgtgtgggtctaatctaacatcatgcgcttctttatagctttcgatatctagtaaatcatttttagctaataagctttttgccgttgttggataagacaatggcaatacattatcttgtttagtgatgtcgaactttaagttggcatcagcccaaatatgaatgctatggctcagtgcaaaacacactagaatcgtgcttgtcgcataacgcggaaatttatattgctttaagcgtgctaagtggtgccatgtatagttacttactaataactgaaacgctaaaattaaaagtacaataccgcccgctagaatcgtggtaagagcaggtgagcttgttaagcggtgccaaagcaaagacacaatttcgggtagtgcagatgtatttaagtgataacccaagttgaaatacacataggcatcaagtgtcaataatgaagcaccaagcgttgcgataatagccgccatccctcggatatgccgagggtatggaaacactaagcttaatggaaatatcgttaaaacaaaggcaataaaagtaataaagctggtgtggcttaaccaagttacgagcatgtataaatagcccataaaggtggttggtgcactgtctgcaactaagtagcttacgctaataaatagcactaagcctatgtttgcaaaggtgaaccaatgtccccaacttagaagctgacttacttttgatgagaattgactttgttgcgataaattcataaatcttatttaaccgactgagctaatgctttggcgaaattgtcggcaaccgcttgtcttttctctgatggtacatgctcttttaaaatatgcgtgatagaatttcctaaacacataaggcttaaatcaacaggcgctttgtgctctgttagtacatcgatcagctgatcaacgatttgttctacttgctcattagaatattttgatatgataggcatcagttggttcggtaaaaagagttatattcccgtattttaacaccagaggcgtgaaaaacaaagatgacaatagatgttaaaaaattagtcgttcattatgtagacaaaaaagatgacgacacagatattcatttacgcaatgatgagatggttgttaacgataaagtagccgtttttattgaacagctacaccatgcatacaatggtaagccgggtaaaggttattgcgcattcagtggcgagaaaaacagtattgttgcatcagctatgcaaagctaccgtaataacgagcttggtttttggcacatgacagagcaagcgacaaatgtgctaaaagaagagctaaataagtatgccttcaacgaaacgggttatttagttttttgccattatcagtatgttgcgagtgactttttgttaattgccatgattaatattaaagagcactactcaattacttctgagcttgatctagcgtcatcacgtcatttagatatttcgcgtatgcaattagctgcacgtgtagatttaacagcgtgggatgcgcaaccagaagataatcgctatgtgtcgtttattaaaggtcgtgccggtcgtaaagtagcagacttcttcttagactttttaggttgtgaagagggcattgatccgaaacagcaaagccaagttatgcttaatgccgtagaagattacttatctgagcaacaatacgataagtcagaaaaagatgagctacgcaaacaagtttttgattactgtaatgattgtgtgactacaggtgaagatgccaatgttaaagaactttcggcgacattatcaaaaagtgacgacagcccatttgaaagcttttgccaagaacaaaattatgacttagaagagtcgttccctgttgataagaaaacagttaccagcatggttaagttttcaggaatgggcggtggtgtcagtgtgagcttcgaacgaaaacatttaggtgagcgagttacctacaacgaagcgaccgatacacttgttattaaaggtattccacctaatcttaaagaccagttacagcgctttatggagcaagaagaaagttaactttcttagctaccgcaaccttccttatttagcccagctttagctgggctttttttactatttgtactcacgttgaaaatttttgcaattatcttaaataaaaagagtgtgagctggtcctttatggttggttttaaattgagatacgttgttttttagtattctaaagccgtaaataaagtgataacaatagaaatggatattcaagaataagtcgtatttttgagtatgagctcacaatagctgcttagtatctaattgagcagcattttaaatatcgagggttaaggaatgtcatcaagtattgtactaattaatccatttattgttcctgaaggcaaattagaagaatcaatcaaatactgggaatcacatcgagattttttaaaaacgcaaccggggtatatatcaactaaattacaccgttcattagaaacacaatcatttttaggtgaagccaaatataaactaatcaatgtagctgagtgggaaagccaagacgcctttaattctgcagtgcaaaagatgcaattagcacttaacagcgaaagagtagaaggtttagtcggtcagcctgctttatacgaggttgttagagaataaataaaggaaaagctggagagattataagttaaaactgtaaatttggttcaacagtgccttggctaagtctcttaactttagcgctatttgggggatatatggatagaatccttagattattaaaacctgaaaatattcgagtcttgttatttttgctaggtattgtgctattagggagaagcttggctacaacacgcccagaatatggtgtgacaattcttactgcacaagagcaaccacaagatattttaatgtattttcatgttgaggttcagcgttatattatgacaatgctttggcctgtttttttcgcgttattaaactcgctctatccaaaagtaaaagtatctaagccatttttttatacaattataggcctacatatcataagcttatttattagtttgatttggtatttcaactatgttccgaacaatcaagagggatcatcacatttagagcaagggttagcgcatatgcaatttagcgcatcaatagtgtttattgttagcctgattagtgctgtgttttctttaatatggtttagtaaagggtgggtcatttttaaatcagatgagtcgccttaattttggcagctaattaactaaatctaaattttttatatcgataatatgtttatcaatatcagtgtgtgccagctctgatatatttctaatgtatgtttcacagtggcttttggtcatggtgccccctaaaaaagcaaatacacaggctttaattcttacgaaaatcaattcctgctttgacatttataagcttcttaaacgtgtgctatttagtcgaaatttttatctaactatgatttatctggctcaatgctggtaaatccattagggtattcttttaagctaaaatttaaaaagagggtaaatgacactttcatttaacactgcaagattaaatgtcattgaagtaaattctaatgcagctaaatcagagcgtactgctctagttaaagctttaccttcgatattaacccccgctgtagttgcaaatttaccgagttattttcaaggcatagaatctaaattagcggctgaggagtggcttaataaaatgctcaaagaatgccatttattaatgctgcagtcttcagaaagtgaaactatagggttcttgttcatatatagcgataacccaaatgcccacattggttacttattagctgagcaatattgggggaagggccttgcatttgaattactgcatggctttatcgacttggcttatacccactcacaatggcataagcttatcgctggtgttgataaatcaaataccgcgtcagttaagcttttaaataaactttcatttattcagcaagatgaagtgataaatgatatgttgttttatgaatttgacttacgcaaagagccttttggagaagagtaacgatgacttaccaagcagttaactttaaagataagttttctaaattcactgaacattggtcgccacgggtcattgccgaaatgaatgactatcaattcaaactcgctaaagttgaaggagagtttgtttggcatgatcatcctgatactgatgaagtattcatagttattgaagggatacttgaaattgagtttagggatggcgctgtgactttggaagctggtgagttatttgtaattcctaagggtgttgagcataaaccaaaagcaaccagcgaatgcaaaataatgcttgttgaacccaaaggggttgtaaatacaggtaatgcgggtgggcaattgactgccacaaatgatgtatgggtgtagcgataatgtcgatatcagattcagaacagtaagaattaaaccttaaaaaaccaacacatcttagtgtttttgtgcttttactatttggcttatactcgtgtttttaattcaggtaatatataaaaagtcagccaatttggatctcaactaacaaggcactagtggcataacgatatatcttaagcttgtgcggtgatcctagtttttaacttaagtatggaaaaagtaatgacaataactgcatttttagttaattcatttaccgcagagggaacaggtggcaaccctgcaggtgtggtattaaatgctgacaatctttcagatacagaaaaattgaagattgcaaaagaagttggcttttcagaaacggcatttgtagcccaagatcatgaagttgactttgcagtatcatttttcacgacaacagaagaagttgatttttgcggccatgcaacacttgctgtgttcgctacgttttatgaaaagggtttattaaaaccaggttattatactcagcgaacaaaagcgggtttgttaggcgtcacaattgccgaagacggcaaaattactatggagcaagccttaccaaaatatcttggtggcttttcttatagtgaccttgcaggcttattagggcttgatgaaactatacttgcagcaacaggtttaccaattgacataataaccacaggcttgcctgatattatcgttgctgtgcctaatggctacttagataaaatgactattgatgaagcagcgctgagcgaattttgtcaacaacataaagtgatcggtgttcacgcatttgagcttttagagagcgaaagtgggctaacagcaagctgtcgtaattttgctcctttggtaggtatacctgaagaatcagcaacggggagtgccaatggtgcgcttgcttgctatttaactaaacatgtatttgttcagcaagaaaaccattttcagtttgaacaaggtcgagcaatgggctgtcgctcacatatttctacaagtgtttactcggatgagcagggcgtaagaaaagtgttagtgggcggatacgccagtgccatcggcacacaaaaaatcgagatttagtgtacatctaaaacaaaaaagccgcgtttcataacgcggcttttttatatagctatcaactagtcagtagataatgttttcgtcatttctgctcgcgctctacctgcaggtttaattgaacctgggcgtagaccactatcaggaatagcgtcacgtttatcatgtgccatagccgccggagtaggttgtggctcgctgtctgcaactggcgctggttttgccattgctgcgcttgctgaacctttaactaacattgttttttcattgttaggtgttggtttagcttcttcagcttgtactggctcttcagctttaactggctcttcagcttgtactggttcgtcagcttgtactggctcttcagcctgtactggttcgtcagctttaactggctcttcagcttgtgctggctcttcagcttgtgctggttcgtcagattgtgctggctcttcagcttgtactggttcgtcagcttgtactggctcatcagcttgtactggttcgtcagctataactggctcttcagcttttactagttcttcagctttaactggctcttcagcttgtgctggttcgtcagcttttactggttcgtcagcttttactggttcgtcagcttttactggctcttcagctttaactggttcttcagctttaactggttcttcagctttaactggttcttcagcttttactggttcttcagcttttactggttcttcagctttaactgattcttcagcttgtactggctgttcagtttgtgactgctttgcttttaactcagcttcatactctgcagcggcttgatcagcaactggaataaacgcaggagcgtcacttttcgcatcacttgatttttcgtcttgctctgggcgacgacgacgttgaccagcggcacgtaaatgacgcggtgaacgacgagagcgagtacgaggttgagcttgttcttcatcagttgatgcttcaactacagattcaacttgctctgtttgttttggctcagcgtcagctttcactggttcagcttttacttgtgattcagcaactggttgctctgcttgttcagtctcaactgcaaccgattcttttgcaggcttagctggtttttcagcttttggtgcttgctctaccggttcattagtttgtactgaattcgcatcatctgcattttcgtctttaacgcgaactttcttgcgcaagttacggcgttgacgacgaaccttaggtttagtttcctttggttgctcagactgtgtttcttgtgccgtttcttttgtcgtttgctctacatcatcagtgcgtttttcattacgctttctgttgttagaattacgacgacgcttgttacgattttcgttaccttctttttgctcaggtgttgaagtatttgtattttcttctttagcctgtgcgtcttcagggcgtttgttacgagagttacgacggcgctgattgttgctacgacgacggttatcgttgttgcgacgattattgcttcgtctttgtgctgcctttttctcttcttgctctttctctgtttcgtcttcagcagtgctaaataacgatttgaagaacttaccaattgcagcaaataaaccaccttcagactttttagctgcaggagtcacttgctcagctttaggtgctgcttgaggagccggtgtagtcggcataacgacaccttttaaaactggctcttcacgaactggtgctgtaggcgctttagccatttcaaatgcttctggctcaggcgcaacaacttgctcgtagctcactgtttcgattgtttcgtctttacgtaagcgaattacttcgtaatgtggcgtttccatgtgttgattaggaatgatcactacatcaacgttgtggcgcttttcgatgcgttgaacactacgacgcttttcgtttaacaagtaagcggcaacagcaacaggcacttgtgcattaacttgtgatgtgttgtctttaattgcttcttcttcgattaagcgaaggatagacagagcaattgattcgtttgagcgaatcgtaccttgaccattacaacgaggacatggaccttggctcgcttcgcctaatgaagggcgtaaacgttgacgcgacatttcaagtagaccaaagcgtgagatcttaccgatttgaacacgtgctctatcaggacgagcagcgtcttttaaacggttctcaacttcacgttggtgacgtggtggggtcatatcgatgaaatcgataacaataagaccacctaaatcacgtaaacgtaattgacgtgcaatttcgtctgctgcttctaagtttgtattaagcgcagtttcttcgatatcaccgcctttagtggcttttgacgagttaatatcgatagatgttaacgcttcagttggatcaataacaattgagccacctgatggtaagcgaacttcacgttggaaagctgactcgatttggctttctatctggtaatgagtaaatagcggcacatcaccttgataaagctttacgcggctcatgaagtctgggcggaaacgctcaatgtgcgctttcgcttcttcgaatacacgtgctttatcaattaatatttcgccaatatcacgacgtaaatagtcacgaatcgcgcggaatattacgttgctttcttggtgaattaagaacggagcagggccactgtcagctgcttgctgaatagcttgccaatgcaccaataatgcttttaagtcgtactctagttcttcaaaagacttaccaacacctgcagtacgaacaattaagcccatgcctttaggaagttctaaacggcttagtgcttctttaagttcagtacgctcatcaccttcgatacggcgagaaataccacctgcacgtgggttgttcggcataagtactaaatagctaccagcaacactgataaaggttgttaacgcagcacctttttggccacgctcttctttatcaacttgcacaataacttcctgaccttctttgattacgtcacgaatgttcggacggccttggaatgtatagccttgtgggaagtaggtgcgagctatttctttaagtggaaggaaaccatgtctttcagcgccataatctacaaaggcagcttctagtgatggttcgatacgggtaattttacccttgtaaatatttgcttttttttgttcgtgacccgggctctctatgtctaaatcatacaggcgctggccatcaaccagtgcaacgcgcatttcttcttgctgcgtcgcattgattagcatacgtttcatattgttactctactaattttgtcgctgacatgacgaagtaaaatcgtctgttcagtggtatttgacggttattcttgtgcagtctcacgactgggtaaagtcaaaaccctaggttgtttgcttacattgagcatcagtatagtgtggcagacaataacatgctgtcatgttattagattctatttggtgccaaaactgccgcattttttgcggttttaatttacgagttttgtcctgaagtcgaccagatttcaatttttattcaatgtcttgctacaacagctgcttctgaatgacgatgttacgttgtcactatcagtcaatttatcttgttcaattgctttttatgttcattaatcaacattcgtgctcaaattattcaggcgatatattacgcgcaccgccgataattgaacgctcgtgttggctgggtaattataaaagctttggaaaacttagcgcggatctgtatgatcggcaacccagaatatgcatcacgaatgtattaatgtgataaaagcaccgttgttacttgcaaacttatgttcgcagcggtgattatcccactaatacaaccgggttagcaactaaattatttacttaaatcagtgattaggcaatgtcagaaaaaaccggcttacaagtttcgtttgttactatcagtgaagaccatctaggtcaacgtattgataactttcttattacccacctaaaaggtgtgcctaaaagtgcagtttacaaaatccttcgtaaaggcgaagtgcgagtaaataaaaaacgcattaaacctgtttacaaattacaacttaacgatgttgttcgcattccgcctattaaagtcgctgaaaaggaagagttcgttccgaagaaacttgataaagttaaacaacttgaagatgcgattttgtttgaagacaagtatttaatggttattaacaaaccttcaggaatggctgttcacggtggcagtggcttaagctatggcttaatcgaagcactacgtgtgcttcgtcctgaagagcgcagcttagagcttgtccatcgattagaccgcgacacatcaggctgtttacttatctcaaaacgtcgttcagtgcttactgatttacataagcagttgcgcgaaaaaaccatggaaaaaaactattgggcacttgttgatggccaatgggatgcgaaaactaaaaacgttactgaagggcttcgtaaaaacaccttaaaatcaggtgagcgagtagtgcgtgtagataataccgagggtaaaccatcgcatacacgttttcgtgtccttgagcgttatgctgaatgctcattagtacaagcatcgcctgttactggccgtacacaccaaattcgtgtgcatacacaatgcaaaggccacccaattgcgtgtgatgataaatacggtgtggcagaatttgatcagtacgtgaataagttaactgggttgaatcgtttattcttacatgcgcatgatttgcgttttatgcaccctaaaaatgaaacgactatgcatgttgaagcgccattagataatgcacttcaaaactgtatcaaaaagctacgtgcagataatgaacaagtttaagttagttatttttgattgggatggcactgtaatggactcagtgccaaaaatcgtcaactgtttgcgtaatacggctcgtgaattaggaattaatattccatctgaacagcaagccaaggatgttatcggtttgtcgctggcaaaagccgctgaagtgctttttcctgcccatacacatttaaacgatgagctagtggcaggttataaggcgcagtatcgtgagttggatgtaacacctacgccgctatttgcagatgtagaaactgtgctaaagcagctaagcgaggctggcatgcaactcgctgtggctaccggtaaagggcgtgaaggtatcgacagattacttaatgagtcaggtcttggtcagtattttgtaaatgtaaaatgctcagatgatgctaagtcaaagccatcaccggatatgcttgagcaaattttgcacgagcagggcatagctaaacgtgatgccgtaatgattggcgatagccaactcgatatggcaatggctaacgctgcaggtattgcctgtattggtgttagttttggcgctcatagcccggcgcagttacaacaatatacgccgttatgtgttgttgattcataccaacaacttttgcaggttttaactacgccccttgcagcgtcaacacatcaacaccaaactcagccagtagtttagttaatgtgatcagtggcaggcctataagtgtatttgggtcatcgccactgagtttttcaaataggcaaatacctaacccttcacttttgaagcttccagcacaattgtatggttgttcagcatcacagtaggcattaatttgctcaaatgtgagtgttttaaatgtcacatcaaaaggcactacggtggtaattgctttaccactttttatatcaaatacactcaaacccgttaaaaatgtcactgtatggccactaaatgccgatagttgcttaatagcattctctttagtatgaggcttacctaaaattgtattgctgaataccgcaacctgatcagagcctatgactaaaccttcatcaaaatgctttattgcttcacgggctttttgttcacttaaacgcgctaccaattgctcgggtgtttcagctttaaaaggggtttcgtcaatatctggagagaaactttcaaaaggtagattgaatttagttaataattgctgtctaaatggtgagcttgacgctaatataagtgttggtttcataataaattctggatgaaaattgtattttgcgaaggataagccacattgaatccgaaaacaaagcagaagatcgttaaaaaccggctaaaaatggttttttactttgactaacttactaactatctatatgatgcagcccctatgcaaaaggtgaaaattcccatcactcttcatcccagcaaagcagcacaacatcgtttaacgtatgacggtattgtaccgcttgaaaaactttctcgtttagagcaagttgtgcaggaagaagcaggtgaaatagcggtaaagattcattgcaaaattgatgagcaaggtttagtggtaataagtggaaacttatcaacacatgtaactgtaacttgtcaacgctgcaatggtgaattagggttggatttggaacaagactttgtgtattcgccagttggtttggatgcagagtcagatcatctacctgcaggttacgatgaagtagaactggacgaaaacggtgaaatcaacgtatttgagttaatcgaagacgaattgattttggctattccaatagtgcctacacacaacgaaacctcgtgcagttattcatcagagcctgccagctttggtaaattagcagcaaaagatgacaaaccaaatccatttgatattttgaaacaacttaagaaagattcttaggagaagactaatggctgtacaaaaaagcaaaaagtctcgtgcaagacgcggcatgcgccgttcacacgatgcgatcagtggtccaactttaactgtagatcaagtttctggtgagactcaccgtcgtcaccacgtaactgctgacggttactataaaggcgttaaagtaatttctaactaagagattgctatatgctgaccaatctaaccatagcgttagatatgatggggggcgattacggcccccgttcatctatccccgctgcagtaaacgcagttaatgcgaataccaacttaagactcatcttatgtggtaatcagcaggttattctaaaagaactcgaagcactcgattctgtttcacaccctcgtttaattattcgtcattgtagcgaagtagttactaatgcgtgtgaacccgctttagcagttcgttctaaaaaagattcttcaatgcgagttgcccttgatttagttaaatcgggtgaagcgcaagcatgtgtaagctctggtaatacgggcgcattattttttatggcgcattatgtattaaagatgcttccaggcgtaaaacgccctgcattaatttctgctgttccaactgaacgtaaaaaccctgtctatttgttagatttaggtgccaatgtgcattgtgatgcacaaacactttatcaatttggcattatggggtctgtggtagcagggcaagctctaggttgtgaaaatcctagagttagtttattgaatattggctctgaagacataaaagggcacgaaggaataaaacaggctgcacagttaatgcagcagtgtaaatatcttaattacacaggttatagtgaaggtagtgatattttcagtggcaaagccgatgttatagtttgcgaaggatttgtaggtaatgtggcattaaaaacctgtgagggtattgccaaactcatcatgcataaactcaccaaagccttacacaaacatttcttatacaagtgtttagcatttttattacgtccagtgataaaaaaactctacaagcgggtgaaccccgaccagtataacggcgcaagtctggtaggattgcgcggtattgttgttaaaagccatggtaatgcctctgcgaaggcgtttcatgctgctattgatgaagccgcgcgggaagtcgaacgccaactccctgaaaaaatcgctgcgatttttgagcaaacacatccaacaacaaagtagtgcagcatagttaaaacttgttatgctgcctactgatgaatatttttttgtttaattataagagcaaagtatggcacataaaattgcactcgtatttccaggtcaaggctcacaagctgtgggcatgttatctgaactattagctgattcacaaattgctaaagcaacattcgctgaagcatctgaagcacttggctatgatctcgctgcacttgtacttaatggtccagaagaagaattaaatcaaacccatcgtacacaaccagcacttcttactgccagtgttgctatttaccgtcaatggttagacgcaaaccctgaagctgatgttgttatggccggtcacagtttaggcgaatattcagcgcttgtttgtgctggcgttgtaagcttaagcgaagccgttaaacttgttgagaaccgtggtttatacatgcaagaagcagtacctgcgggtgttggttctatggctgcaatcatcggtttaggtgatgatgaaattaaagctgcctgtgaagcgtcagcaaatggtgacgttgtttcaccagtaaactacaactctccaggtcaagttgtaattgcaggtcacaaagcggcggttgagcgtgcatcagaagcatgtaaagaagccggcgctaaacgtgctttgccacttgcagttagcgtaccttctcactgtgaactaatgaaaccagccgctgaaaaattagctgctgatttagctgctttaacatttaatacacctaagtgtgatgtaatcaacaatgttgatgtaaaagctgagcaatcaagcgaagcaattaaagatgcattagtacgtcaactatacagcccagtacgatggactgaaacagtacaagcattggttgcacaaggtattacacaaagctatgagtttggccctggtaaagtcttaacgggtcttgcgaaacgaattgataaagcaatggtatgcgctgcggttaatacgcaagctacgattgatgaagcgaaataagtaggaatagaatgacaaatttattttctcttgagggcaaggttgtcctaatcactggtgcaagccgtggtattggtaaagcaattgcaaacacgttagttgcacaaggtgcaaaagtagcgggaactgcaacaagcgaatcaggtgctgctaaaatcagtgaatacttaggtgacaacggtaaaggttatgctcttaacgtaaccgatcctgagtcgattgaggcaacacttgctgcaattaaggctgatttaggtgatattgacgtattagttaacaatgcgggtatcacccgtgataacttattaatgcgtatgaaagacggtgagtgggatgacatcatcgacactaacttaagctcaattttccgtttatcaaaggctgtattacgccctatgatgaaaaagaaaaatggccgtatcattaatattggttctgtagtgggcactatgggtaacgcgggtcaggcaaactacgccgcggcgaaagcgggtgttattggttttactaagtcattagcacgcgaagttgcctcacgtggtattacagttaatgtagtagcgccaggttttatccaaacagacatgacagatgagctgactgatgagcaaaaagcagctacgcttgcaaatgtacctgctggtcgtttaggtcaacctgaagaaattgctgctgcagtgtgttatttagcatctgacgctgctgcgtatgtatcaggcgaaacattgcacgtaaatggcgcgatgtacatggtttaatgaaagttggcaaaaatttgctaacgaaagattatcgaaaattgttgaattttttgtgatcttgctttaaacatacttgaattcgctatgaaaataagcgataaatgaacaaataccaatcaagaggtttgaccagataagtaattatcagcaaatccttgaatcacagaattatgcggcgtaaactacgccgcaatctgaaaataacgcattggcgtttttaataaaggaaagaagaatgagcgacatccaagaacgcgtaaagaaaattatcattgagcaactaggtgttaaagaagaagaagtaaaacatgaagcttctttcgttgacgacttaggtgctgactcacttgacactgtagaactagtaatggctcttgaagaagagttcgacactgagatcccagacgaagaagctgaaaagatcactacagttcaagctgcaatcgattacgttacagctcacgctgagtaattttacgcattttgatttttaagggcagcgtttagctgcccttagtctatctatagaatgatactaattattaccaattagcagtaaaaattgctaattatgaaggtgaagcctagcaacaatgtagtggaagtttctgattcaaaatcactaacaatgaaacttttgccatattaccaatttagctttttcttcaaatgacgcgatataacgttattggtataatttggtttacacctacctaaaataatttccttattggaggcaacccgtggctaaacgtcgagtcgtcgtaactggcttaggaatgttgacaccgctaggtaatgatgttgaatctacttggcaaggtttgttaaacggtaaaagtggtattcaaactatcacacatttcgatacctcaagtttcggcaccaaattcgcaggtttgctgaatgactttgatgcatcagcttacatgtcaccgaaagatgcaaagaaaatggatttgtttatccaatatggcattgcagcgggtgtacaagcactacaagattctggtctagagatcactgaacaaaacgccacgcgcgttggtgttgcagtgggttctggcattggtggtttgacgttaatcgaagaaaaccacattaaactactaaatagtggtccgcgtaagctttcaccattttatgtgccttcgactattatcaatatgatctcgggccatttatcgattatgcatggtttacgtggtccaaacatttcaattgttacggcatgtacaacaggcttacataacattggtcatgcggcgcgtatgattgcatacggtgatgcagacgcaatggtagccggtggtgcagaaaaagcctctacaccaattggtatgggtggtttcaatgcggcacgtgcactatcaacacgtaacgacgatccacaagcagcatcacgcccttgggataaagaccgtgacggttttgttcttgctgatggtgccggtgttatcgtacttgaagaatatgagcatgcaaaagcacgtggtgcgaaaatctacgctgaactggtaggttttggtatgagtggtgatgcatatcacatgacctctccacctgaagacggtgcaggggcagcactggcgatggaaaatgcattaaacgatgcacaagttaatgcagaccaagttggttacattaatgctcacggtacatcgactaatgcaggcgataaagccgaaacatcagccgttaaaactatttttggtgatgcagcgaaagatgtgatggtaagttcatctaaatcaatgatgggccacttgttaggtgcagcaggctcagtagagtcaattattactatcttgtcacttgttgaccagaaagtaagccctacaattaaccttgataaccctgatgaaggttgtgatttagattatgtaccgcacactgcacgtgacgctaaattggattacgcactatgtaattcatttggttttggtggtactaatggctcgttgctgtttaaaaaggtataattctttttaacaacggactaaaagaagagcccagttgtttaactgggcttttttgtatgagtaaattaaaacaaacaataaaaataatcacaccagacaccacaataagcacacaagatcgtggcttaaattacggtgatggctttttcacgactgcctcagtggtggactcagaggttgagcactgggatttacataaagcgcgtttagaagaatgcgcgcaaaggctatttttcccggaattagatttaaccgcaattgagtgtgaagttaaccaagcaattagtgatacacaaacgggtattttaaaaatagtcgtcactcgtggcgcaggtggtcgtggttatggtttaccagatacgcccaatatccaagttcttatcactgtattacctgcggtttcacactatcaatcctggcaacagcagggcgttaaattagcaataagtgacgtgagacttgcataccaaccgttacttgctggactaaaaaccctaaatcgtttagagcaagtacttataaaaaagcacatgcatactgttgagtgtgatgacgttgtggtgcttgactataaaaataatgtgattgagtgctcagctgcaaatatattcgccattaaaaacggtaatatcgtttcacccaagttagatggctgcggtattacaggggtttatctaaacgctttatgtggtaagttagccattgagtttaaagcaatccaactggatgagttgctagctatggatgccgtatttatgtgcaacagtttaatgggtgtggttccggttacaagcattgctgatacacagtttgatattgtacgcagtaacgcgctattagcggcgcagtttgccaaggagaatacgtgataaaagtcattgttagcgtgctgttattagcattgctatgttgtggtattggctatcaacagcttcaatcagcactaaaattgccgttaaaagttgaaaaaagtactttattcaaagtagagcgcggcactggctttaatcaactctgtcaagcatggcaagcaaaacaatgggttgatagctgctttaaatttcaggtactcgctaaattagatccgactcttactgatttaaaagcgggtctgtatgaacttgatacaagcgctgtgattgataatattcgccgtatcaatgaaggtgcacaagtaagctttagtttcactattattgaagggcaacctcttcgagaagtggtggaaaacatagcaaaacaagctcatttaacacaagatttagatccagaaaatttagcgactcagattagcaacacgcaagaaaatttagaaggctggttgttcccagacacctatcattaccatagtgaagatagtgccagtggcttattaaaacgcgcttacagcaaaatgcagcaagaattagaggctgcatggcaaaaaagagcgccagatttagttttaaactcaccctatgaagctttaattctcgcgtcgattattgaaaaagaaaccggccttgcttctgagcgaccattaatttcggcggtatttactaatcgtttaaaaaccaatatgcgtttgcaaaccgatccgacagttatctatggtataggtgcggattttgatggtgatattaagcgcaaagatttaacaacgtatacaccgtataatacatataaaataaaaggcttaccgccaacaccaatagccatgccatcgaaagcagcgctacttgcggcagttaatccgcctgagtctgagtacgtgtattttgtctcgaagggagatggcagccatcaattttcgaaaacgttacaagaacataatcgcgcagttaaacagtatcaattgaattaacaaccagaatagagtcatatgacagcgaaatttatagtgattgaaggccttgaaggggctggaaaatcaacggcaattgccgtgtgccaagcttatttagaaaataagcagatcgaatttatcaatgtacgtgagccaggtggaacacccatggcagaagaactacgtagtatcgtaaaacaggctcatcaagaaacagtcacttctgaaactgagctgttaattatgtatgcggcacgttcgcaattggttgctaatgtcattgatccagcacttaaaaagggcacttgggtgttaggtgatcgtcatgatctctcatcgcaagcgtatcaggggggtggtcgtgggattgcacaagagcaactttcttttttagctgatatggtgttaaagggtttaaaaccagacttaacgatatatttagatattgagcctgcagtgggtcttgaacgtgcaaaaggacgtggtgaactagaccgtatagagcaagaagctttaggcttttttgagcgcactcgagaacgttatcttgagattgcaagcactgacaacagcatcaaaacagtagatgctaatcaaaccatgcctgaagtgcatgcagctattaccagtgtgcttgatgaattcttcaaaggtgtaaattagcatgcctttgccatggcttgaacctttatatcagcaattagctcaaagctattcgcagcaacgtttccatcatgcacagttatttaatggcgatatcggtgtaggaaaacgtgagctagttgatatgttagctgatgcgttactgtgctctaatgcccataacctaattgcctgtggaaaatgtaaaagctgtcaattaaaccgagcaaacacacatcccgacaagcgcgttgtaaaggctgaaggccaaactattggtgttgatgaagtgcgtgaaattacagattttattaatcattcatcagctcaaaatggtaataaagtggtggtacttgaacacagtcataaaatgactaccgcagctgcaaatgccttgttgaaaactcttgaagaacccagtttaaatcgatacctgcttttaacctgtgaacaactggctttattgccagccacaattttaagccgctgtgcagttcatgaggtaaaggtaaatcctagcttagctaaaaaatggttgggtgaatttaatatacctcattattcttggttagaactatttgtagagcagccaatgcttattgagcattggtataatgaaaagcaattagactcaatagattccctctataaatttgcaactgagttaaaagacagcgataatttcagtgctttagtcgagatccttagcaaagatagcaccttgattaatgtatttgttctgtttttaacagaacatttaaaggagaaattagtattagggatggattttttcagctaccaaaaagcgcaacaagccatagcagaatttctgtataatagctcgcatgtgctaggtttaaatatgtcgctggccatttcgaagttagcgttttcattacgtgaaagccaaaattaggatacatcgtgcaagaattattagtagatattgaagacttagaagaattatatcgctgttacatgccgtacttaaaaaatggtggtttatttgttcgcactaatatgcgttttgaaatgggccattcacttgcattaaaagttactttacctgatgcattggaagacgatgtagtgacaggtaaagttgcttggatcaccccgcaaggtgctcaaagttcaaatccaccgggtatcggtgtgaattttattgatgacaaaacgaatttgaatgcgaagatcgaaaaacttttgggtactatgttaaactctggcaatccgacctataccatgtaataaaagtagtaccatgattgtagattctcattgccatttagacaggctcgatttcgataaactcgaccttaatttagaccaagtacttgaaaatgctcgcgcaaagaaagttgaacatttcttgtgcgtgagtgtcactttagatcaattcccaacgatgctggataaaatcaaacactatccagatgtttctgcatcatgcggcgttcatccacttgatcaaaaagacgcgctcgataagcaaaaacttatttcacttgctagccacgataaagtggttgcgataggtgaaaccggtctagattactattactcaaaagacacccatatagttcagcaagaaagttttgttggtcatatcgaggttgctaatgagctcaataagccgctaattattcatactcgtgatgccagagaagacaccattaatctaatgcgtgcgcataatgcagagaattgtggtggtgtattacactgctttacagaaaattgggaaatggccaaaaaagccattgatatgggcttttatatttcgatttcgggtatcgttacgtttaaaaatgccgttgagctaaaagatgttgtaaagcaaatcccgcttgatcgcttattaattgaaacagactcaccctatttagcgcctgttccttatcgtggtaaaacaaatcaaccagcctacgttgaagatgtagcttattacatcgctgagttaaaaggccttacttttaacgagttagccgaagcaacaactaacaacttttactcgttgttcaatcaagctaaaagggcgtagtggtgcaaggcgtatcaaatttacctcagttagtaatggggccaaaggtacgccgagcagatgcagggcgagtgtgctttcaatttgttacaactgtgccttgccaataccgaattgagtttaaaggtgttgatacttactctaacttagagtcaattcaattagggcaacatctttacttaaatttcatcaatgtcatgccagtcagtggccagtttacagtagattcactgatctattattcgttacatgatgaagataaaagcattgatctgtcgtcttattgctacgagcgagctgaatctcctgcatttgtgatccccaataggctcgataggattcttcatggttcctgtcgtaaccctcatcacccagcaaaagatagtctcgttgctgctgacaaatggcaaaatgaccagcgtcaatctcttaatgcaggtgctgacttattattgttatctggcgatcaaatatatgcagatgatgtcgcagggcctatgctgctcgcgattgaaaaagtgattagcttgtttggtgtgtttgtagagccagcgcttgatttagatttaccagcagggtttgagcagcaactttataagcgccatttacacttacccaaagtgccttggcaaaaacgcagcaaatttggtgttggttattggcttaaaaaagatgagccgcacttctcaagcttaaaagctgaaaaccacttaatccattttcaagaatttatagcgctttatttattaaacttcagcgcggttacttggcagctaattgagttcgaatcaattgaatgcccagcattagcccctaaatacgctaatctatttaaacttgaaaaagatgcactgcttggttttgcaaaaggccttagtagtgtcgaaaggttattcgccaatgtgtcgacattaatgatgtttgatgatcatgatgtcaccgatgattggaacttaaccgcaggatgggagcaggctatttatcagcacccagctagccgacgcatagtaaataatggcctgattagttattggttaatgcaagggattggtaatgatgcgggtactaactcattgtctttattgccaagttttaagcagagtttaaagcagcagagttggcattttaaagactttgataagctaatactcaattttaaccattggcattatgagcttaataccatacccaaagttgtggtgctcgatacccgaacccatcgctggcgtaatgaacaaaacttcaatgaaccatctggcttacttgattgggaaaggctaacggaattagaagaaagcttattgtctcacgataaagtgattattgtatctccagcaccggtgtttggtgttaaatcaattgaagcaatccaagctatttttaatttttgtgggcaacctttgctagttgatgttgaaaactggatggcccacgaaggttccgctaaaaagctacttgatactttccgccgtgaagatacaccaaaagaaaccttgatactctctggtgatgtccattattcattttgtttttcagtgcaaaagcgctttggcaaacataaaaaccgtatttggcagttaaccgccagtggtattaaaaatgagtttcctcgcaagctcattaatgtactcgataagctagattcgattttatatgccccaaaaagcccacttaacttttttactaaacgttggcagatggaagttgataaacaccaaaccatgggggaagggcaaaagtatttggttagtaatgcagctatcagtttgatagagctcaatgatggtttgctcgcaaaatatgaactaattcatgctgacaaccaaattacagaattcgatttaaacacacattaatcgaataatcagaataaaaaaacgcccagaacgaatccgcattgttctgggcttaggggtggctcgtgcgagcctgcgctaactataaaaaaacaccttctaaattcagtagggagaagtagaaagtacttttaagtgtagttaattagcaggaaattgcacggtaaatgtacaaattttatactagtttaaaatcagcctgttacggctttttacctaaaaaggtgcctactttatacaagccttatgcgcaacttatacccaagttatcaactgggcattttgtactaaatcacgtggtaatgagttcttaattttattcttttgccacttaccaaggcctacaggacagccacataacattaacactacttcaccattatcttgagttggtttttcgagccgaatatctttaccgttaaagtaatcgtttgcttggcaagcagacatctcaaaggtatttttatcgcaatcttggccaaatacggtggcaaattcatgcgctaagcgaaccccacctttgtgaattacaccaagttgaatacctaaacgtgagtatttaattttatcttgcagttcatcaaagccatcaggaaacaaccaaagctctttatcacgctgcattaaagtgcctttaagtgattttagaccgaactgttttttaattgtttgcataaacgcttggctttgctttttatcaaactcagcaaacggaaatgcgcctttcttaacttttagattggggttatcgcttgacgctattttcttaaatttagcgatgaagaaaccttcactatcgtaagtttgcggccaaacgtgcaaataaccttcgctggttgtcgctttatctgcgccatcgaacaggctatcgagtgattgtacttcgatgcaatcagggaactcagctaataggtattcgcacacttgttggttttcaagtggtgttaaagtacaagtcgaataaactaatgtgccgccgggttttagggcataaaaggcacttttgatgagtgctttttgcacagcagcaatatcaatattagattcgattgaccaattctttagggcgtctgcatctttacgaaccgtgccttcacctgagcacggggcgtctagcaaaatactgtcgaagcactcatacatgtaatctccaaagatcacaccatcaaaatgtgataacgcacagttaccaacacccatacgtttgagggttgctgccaatacttttaagcgtgacgatgacaattcattggcaattaacacgccactattatccatcatggcagcgatttgtgatgtttttgaacctggtgccgatgccatatctaatacagtattgctttgctcaacctcggctctgagtgcaactggcggcagcattgagctggcttcttgaacatacatagcgccacttaagtgtaaatcggtattaccgattgcaaggacttcttcttcctcacttggacgtgttaaccagaatccttcttcacaccatggaattgctgttaactcccatcctttattggcgcattgacgctgaaattctgagactgacatttttaatgtatttacgcgaactgagcgtctaagtgggcgacgacaggctgcaataaagtcgtctaatgataaatgttcaggaaggtagctttttacatcatcaataaatgaatctggaatatatgtattagcgtccactaaatggctctcacgtcacgtaataataggcggatcataccatttatagcgctgtcaggggatatttttagctttttacgagtgatattaaagtgtcgacaaattaccgatataaatgtcttttatagtcattatttttgataaaaatcattttatgtcgacatttggctggttttttagtctatttttccgatctcaaggttgacacattcaatgatagggcgcatagtgaactcacaaattgtcgacaatcttgatttagtacttaaatagacctatttatgacagagcaaaaagccaacgataactacaacgatatcacgataacaacggcatcagaccaagtgtttgtcgacatgcgtcgtgaaattgtacaaggcaccatagagcagggtagcaaaatttctgagccagaacttgctaaacgctatggtgtaagccgtgccaccctacgcgaggcgctaaatcgtttagagagctgttatttggtagagcgtaaagccaatgttggttgccgtgtagtcgcactgaccgctgagcgtttaatcgaagtctatcaggtacgtagtgcccttgaggggctcgcttgtcggttagctgccgacaacatggaacctgaagaagtgcagggtttaaaacagttattgaaccagcacttacaaacacagcgtgtaaaagaaggtgaatcatactaccaagaagcgggcgaccttgattttcattatcgcattataaaagggtcgaaaaacgcacacttaattcatcttttatgtaatgagttgtaccagttaattcgtatgtaccgtgtacaaatgggtatggttgggccacgtgtatcaaaagcatttgatgaacacttggctattattaatgccattgaaaaccatgacggtgaattagccgaaatgcttatgaaacgccatatcagcgcgtctcaggcaaatattcagactaagtttgacttactcgcagcaaaaaatcagtagcgccgtagttaaacagtcacaatttagatttaaaaatagagtcagccaaagagctgaaaccgttcaaagataggagttatccaatgtcagcaggattaaagttcaaacaggcaattgccaacaacaagccattgcaagtggttggcaccgtcaatgcgtactgcgcaatgatggcagaaaaaacaggtcaccaagcactttacctctcaggtgcaggtgttgctaacgcgtcatacggcatgccagatttaggtatgactagcctagataacgtacttgaagatattcgtcgaattaccagcgctaccgacttaccgcttcttgttgatgctgacacaggttggggcggtgcatttaatattgctcgtaccgttaaagaaatgaccaaagcgggtgctgcgggcttccatattgaagaccaagtagcacaaaagcgttgtggtcaccgtcctaataaagaaatcgtgtctaaagatgaaatggttgaccgtattaaagcagcggttgatgccaaaactgacagtgatttttacatcatggcgcgtactgacgcattccaaaaagaaggcttaaatgccgcgattgatcgcgccgcagcatgtgttgaagctggcgcagacgctatctttgcagaagctgtacatgatttagcagattaccaagcgtttgctaaagcgttaaatgtgccaattcttgcgaacatcactgaatttggtcaaacaccgctctatacaaaagagcagttaagcgaagttggtgttgaaattgtactttatccattaagtgcatttagagccatgaacaaagcagcgcttaatgtgtattcgtctattcttaacgaaggctcacaacaaagccaattagacaacatgcaaacacgtgcagaattatatgagtttttagattaccactcatatgaaaacacactcgataaccttttctcagctaaaaaatcataacgacaacatataaggagaacactcatggtagataaagcattaggcggcgcaggtttacgtggtcaagtagcaggtgaaacagcactgtgtacagtaggtaaatcaggttcaggtttaacttattgtggttatgatattagtgaattagcagataaagcgcagtttgaagaagtgtcttttttactgtcgcgtggtgaattaccaacagaatctgagcttactgaatataaagcaaagctaaaatcactacgtggtttacctgaagcactaaaaacagtgcttgaaaacatccctaaagacgcacacccaatggatgtaatgcgcaccggttgttctatgctaggcaacctagaaatggagcaagatttctcacaagccaatgatgcgattgaccgcctagttgccgtattcccaagcattatttgttactggtatcgttttagtcatgacggcgttcgtatcgacactgaaactgatgatgattcggtaggtgcacactttttacgtttattacatgacaaagcaccatcagcactgtttgagcaagtaatgaatgtgtctttaattctttatgctgagcatgagtttaatgcatcgacattcactgcgcgtgtgtgtgcatcgacattgtcggatattcattcttgtgtaacgggtgctatcggtagcttacgtggtccactgcatggcggtgcaaacgaagccgctatggatatgattgaaggcttcacaagcccagatcaagctgaagatgcactgatgggtatgcttgagcgtaaagacaagatcatgggctttggtcacgctatctaccgcgaatcagatccacgtaacgtgatcatcaaaaaatggtcagaaaaactggctgcagaagtgggtgacgatgttctttatccagtgtctgttcgctgtgaagaagttatgtggcgtgaaaagaaattattctgtaatgctgatttcttccatgcatctgcgtatcacttcatgggtattccaactaagttattcacgccaattttcgtgatgagccgtgtaacaggttggacagcacacgtgaaagagcaacgtgctaacaaccgtatcattcgcccaagtgcagattatacgggcccagaagcgcgcagctatacgccaatttctgagcgttaatcgttaattaaatcagtgataggggtagcttagctgcccctttatgaaggggcgaaataaatacaaaaacaatcagcccacctttgttcaccgtcaccaagtacaagtagaatcatcatgaatacaaattttagaaaaccattagcaggcacaggagtagattactatgatacccgcgctgctgttgatgcaattaaaccaggcagctatgccacacttccttacacatcgcgagtacttgccgaaaacttagttcgtcgttgtgaacctgaaatgctaaatgatgcgctgtcgcaattgattgaccgtaagcgtgatttagattttccatggtttcctgctcgtgttgtgtgccacgatatcttaggtcaaacagcgttagttgatttagcaggcctacgtgatgccattgctgcaaaaggcggcgatcctgcaaaagtaaaccctgtggtaccaacacagttaattgttgaccattcattagcggttgaacacgcaggttttgaaccggatgcttttgaaaaaaaccgcgctatcgaagatcgtcgtaatgatgaccgttttcattttatcaattggacgaaaacagcatttaaaaatattgatgtgatcccgccgggtaacggcattatgcatcaaatcaatttagagaaaatgtcaccggtgatccaaaaccgcgatggcgtggcattcccagatacactagttggtactgatagccatacacctatggtcgatgcattaggtgttattgctgtaggcgtgggtggtcttgaagctgaaagcgtgatgcttggccgagcgtcttacatgcgtttacctgacattgttggggttgagctaacaggcaaaccacaaccgggtattactgcaaccgacattgtattagcgatcaccgagtttttacgcaatgaaaaagttgtgtcgacctaccttgaattttatggtgaaggtgccgatgcacttaccttaggtgacagagcaactatttctaatatgacgccagagtttggtgcaacagctgcgatgttctacattgatgacaacacacttgattacctacgcttaacaggtcgcgaagaagagcaggttaaactagtcgaaacttacgcaaaagaaaccggtctttggagcgatagccttaaaacggcagaatatgagcgtgtgttaacctttgatctgtcatcagttggtcgcaatattgcgggcccatcgaatccacatcgccgtgttgcaacaaaggaccttgataaagcgggtatcactggcatcgttgaaaatcaagaaggcttaatgccagatggcgcctgtatcattgcagcaatcacaagttgtactaataccagtaacccacgcaacgtaattgctgctggtttacttgcgcgcaatgctaacgctaaagggttaacccgtaagccatgggttaaaacatcactggcaccgggttctaaagcggttaaatcttacttagaagaagcaaatttattacctgaactcgagcaacttggctttggtatcgttggctttgcatgtacgacctgtaatggcatgagtggtgcgcttgatccaaagattcagcaagaagtgattgaccgtgacttatatgcaacagctgtactttcgggtaaccgtaattttgatggccgtattcacccttatgctaaacaagcattcttagcttcaccaccactggttgttgcttatgccattgctggtactattcgctttgatatcgaaaaagatgtattagggtacgatcaacaaggcaacgaaattcgcttaatggatttatggccatcagatgaagaaattgatgcagtgatcaaacaaagtgttaaacctgaacaatttaaaaaggtttacgagccaatgtttgatttaagtgttgattacggtgaagacaacgatccgctttaccaatggcgtccacaaagtacttatattcgccgtcctccttattgggaaggtgcattagcgggtgaacgttcgcttagtaatatgcgtgcattagcggtactgggtgacaacatcaccactgaccacttatcgccttcaaatgcgattttagcgtcaagtgcagctggcgagtacttagctaaaatgggcctcccagaagaagattttaactcgtatgcaactcaccgaggcgaccatttaactgcacaacgtgcaacattcgctaaccctaagttattgaatgaaatggttaaagaaaatggtgaagtgaagcaaggttcatacgctcgcattgaaccagaaggcaaagtgacacgtatgtgggaagcaatcgaaacctacatgcagcgtaaacaaccgcttatcattgtggcaggtgccgattatggtcaaggctcatcacgtgactgggctgcaaaaggtgtacgtcttgcaggtgttgaagtgattgcagcggaaggctttgagcgtattcaccgcactaacttaattggtatgggcgtactaccgctagaatttaaagccggcactacgcgaactacattaggtattgatggcagtgaaacctttagtgtgaaaggtgagccaacaccaggtgcaaccctgaccttagtgatcacccgtgccaatggtgaaaccgttgaagtaccaatgacgtgtcgtttagataccgctgaagaagtgtcaatttattcagctggtggtgtactacaacgtttcgcgcaagatttcttagaatctgaggagcactaagtaatggcgtttaaaccacaaattaaggtgccagcgacctatatgcgtggcggcaccagtaaaggggtgttctttaacctaactgatttacctgagcctgcccaagtggcaggtgaggcgcgcgataaactgttattgcgtgtaattggtagccccgatccttatcaaaaacaaactgatggcatgggcggcgcaacgtcaagcaccagtaaaacggtgattttatcgaaaagcgctagagctgatcacgatgttgattatctgttcggtcaagttgctatcgataaggcgtttgttgattggagtggtaactgcggcaatttaacttcagcagtcggggcctttgctgtgtcgaatggccttgttgatgccaacaaaattccagaaaacggcgttgtcgaagttaaagtatggcaagtcaatattagtaaaaccatcatagtgcatgtgccaattacaaatggtgaagtacaagaaactggtgattttgagcttgatggtgtgacattccctgccgctgaagtgaaacttgaatttatggaccctgcagatggcgaaggggccttattcccaacaggtaacttagtcgatgaactagacgtgccaggcattggtatgttgtctgcgaccatgatcaatgcgggtattccaacggttttcattaacgccagtgaagttggctatgatggtacagagctgcaagaagccattaacggtgatgtatctgcgcttgaaaaattagaaactattcgtgcttacggagcattgaaaatggggctaatttctcatattgatgaagcaaaagcacgtcaacatacgccaaaagtagcttgggttgcaccagctaaaacttattatgcgtcaagcggtaaagttgttagtgatactgatattgatttagtggtacgtgctatgtcgatgggtaaattacaccatgcgatgatgggcacagctgcggttgctattggtactgcagctgctattcctggcaccttggttaaccttgctgcaggcggtggcgagcgtcaggaagtaaactttggtcatccttctggtactttaaaagtgggtgccgctgcaacgcttgttgatgataaatggcaagtcacaaaagcaagtatgagccgaagtgctcgtgtgttaatggaaggctgggttagagtgcctgagtagtactctatagcgtactgatatgatcaaaataaagcggcggttacgtcgctttttctaatccgtagcactgttgtttcatgccttcaataaactcatcaaacttgccgctttgttgcatcatttcaatttcatcattcaaatcttgtaaaactttttgccaatgcggtgttgatttactgacagagtaataaagtgctttgtattcaagttttggttctagtgcgaccagtgattctaatatttgtcgtttacccttaattgataactcagatttatgaacgctggcttttaacacttcaagatctgccacaatgaggcttacacgattacttaataagaggtgtattaattgatactcattatttgctacgattgtatcgatttctttgttatcgatcatggcatctaattctttggtgtttttatatgagcgtaccactccaataggcaggtcttttactgagtttaagtcaccattgaaagggatttggtttccttttaacgccacgaaagatagatctcctcccgggattgcatgacttaaagcgagtaaatcgttacgggttttatctaaaaagttatcagaaatcacattaccttcaatgaagtactcaggaaagaggatgtctgctcggcctaattcagcttctctaactgcacgagcccaagggtaaaaactaatatgaacgccgtagcctttttcaagaagagcactgaccgtaaattggaaaagccaacctttattacataagttttcgtctatataagggggccaatcgagggtaacaagctttagaacgtgtttggcatctaggttataaccgtacccgccattaaagcgtaccgcttgctctgtaataaattcgccatccatttcataagtaacaggagtaaggttagcaatagcttgatatgaaaaaaataaaaataacgctgcaaacagtttcatatagtatttaagttttgttatttacatatagcttagtcttttgctgtaaatatacaacctaatcacttgaacaatatacctctaagctgtggcttaaatctaattcatatcgttgacagggtattcgcaacatagtagatttcgtcgggtgtggcgaagtgttacaccgctttaaggacgaccttaaagttgaaattaaattcggggacgaccccataaagaggtcgaccatgaattggatcctacttattactgccggcttacttgaagtcgcttgggcttatggcctaaaacaatcaaacggttttactaaaccactcatttcattctttacaattttaactatggctgcgagcttttattgcttaagtgtgacgcttaaatcattaccacttagtttggcttatgccgtttgggtaggtattggtgtaattgggtctgcaatactaggtatgacgctactagcagaaggcgtgagtctattaaaaatagccagcttactgctgattgcccttggaattattggtttgaaattagccagttagattttttatctctgaaaataattaagtaatatttcggattggtattaaataaaaatccgataggctgtcgctctatcggattttggtcctgatcaaatgtaatttgggatttattacttagtgtaatttcttataatcaacgacccgttgctgttgtacacctaagccttcaatgcctagggttacaacatcaccatcgttcaaataaattggcggagtttgccctaaaccaactcccggtggagtacctgtagagataacatcgcctggttgtaggctcataaattggctgagatagctaacaataaacgcaggatcaaacaccatggttttagtattaccattttggaattgggtatcgtttacttttaaccacatatctaaattaagtggatcagcaatctcatctttggttactagccaaggaccaagtggaccaaatgtgtcacagcctttacccttatcccattggcagccacgctctagttgaaagttacgctcagatacatcattacaaacacaataaccagctatgtagtcattggcattttcaacattgacataggaggcgtgcttaccaatgacgatggcaagttcaacttcccagtctaatttttcgctgtttttaggtttgataatattatcgttaggtccactgatggcgctggtggctttactgaatacttcaggctcatttgggattgccatgccagattctgcagcatgatctgcgtagttcaaaccaatgcaaatgaacttaccaacgttagcaacgcatgcgccgattcttactgactcatctacaataggcagtgatgtaaggtctaagcgttttattttttctaggctctcaactgaaagagcggctccattaacatcattaataatgccacttaagcaacgaattttaccgtcaccatctataataccgggtttttcttggccttcagggccatatctgagtagtttcataatgattctctttacttcagttaattattaagtgtgacgaaaccgccatcaatcgggaaattactgcctgttataaatgcagcgtcgtctgagcataagtaatcaacaagtcctgcgatttcttcaggtttacccatgcgaccaataggttggctttttgagagcttttcaaacatctcagcctgattatctgggtagctttgtgctaaaaagttatcaacaaaaggggtatgaacacgaccaggggcaatacagttacaacgaataccgtatgataaataatcttttgctacagagtaggtcatggttaaaacggcacctttagtcattgaataggcaaacctatcggcaattcctacggatgaagcaacagatgctagattaatgatgacgccgctttgtttttctttcatgcttgcaatggctgcatgcatacagttataaacacctttaacattgatgttatagagtctgtctaagtctgactctgtggtattttcgatattgccaatgtgggctatacctgcattgtttatcagaatatcaatggcatagtgtttttttatagttgcaaacaactcagctacttgttgatggttagctacatccactgcaaatgcttgtgcagatccaccgttttcatttatttcttgcatcactgtgtttgcagcatcgatatttaaatcaacaacaagaatatgcatattccgtttcgctaaacgtaaacagatacttcgacctattccgctaccacctcctgttactaaggcaattttttttgagctttgctgattcataatgtgtccttaaaaggtgtgattagagtaacttataaaaatttcgcgcattttctgaccatatcaactgccgttctgctttgggcaattcattgatcaatgcctgactaatgtcatgccacaaatcataactgccattcatgttgacaacaggccaatcacttccccaaagaattcttttcggaccaaacaattgataaatgagctgaaaatattgacgataaatagcaacatcaacacaatctgttgcagcttgtgtcattagtcctgaaaacttaatagaaacattttctaactctgccaagcaggttaactggcgttgccatttctttgacataggttttgttaagtcaggtttagcaaggtggttaactacaatatttaattgtggatagcgctttgcaattgatgttatctgctcaagatgtatatcaagtatgagtgcatcaaatgtaaggctgttggttgctaaaaaatcaaaaatagcagcaaaatcgtcattgagtatccagtcagggtcgtcaatatcttgcaacattggacgaatacctttgaaatagggatttttacttaatgacgctaaatgagaaatgacatcgttggcttgaaaatcaacccaaccgacgactcctgctatgaaatcagttttattagctagttcgagcaagaagtatgtctcatctattgaatctgcagcttgaactacaattgtgctcgttatgccatataactctaatgctgaagctagtaattcaggcaaatgatctttatagagacaagtaaagtcagaagttagccagttatagtctcctcggcttaattgccaaaagtgttgatggctatctactttttctattattgagctagatgttgatttcataattacgctcattacatcggtactggggcattttcagcaagtaactgttcagattttaaatcttgccaaaatgcacaagggatcacttcattaaatagctgtacagtttttgcaactcgctttgcattgccaaggcctggaataaccgatgcaactgccgggtgtgcaagcggaaattgcagtgcagcagcagcgagagtgacattatggtctagacaaatttgctcaattttatctacttttaaaattacttctttaggggcagggttgtagttataaaagggcgttttgttagtgcgaacgccagttgctaatatgcccgagttgtaaggaccgcctagaattatcgacgtaccatttgcaatgcattgaggaagaaactcgttgactggttcttgttcaagtaatgagtatcggccggctaataaaaaacaatcaaactggccaatattcatggcacgcttacaaatttctacttcgtttacacctaaaccaatcgctttgatttgtccgctatctttaagttcatcaagtgctctataaccaccttgctcgaactgcataaaataaaatgaatctctatctccatgagtatctctgccaagatcatgaaccagaagaatatcaatttcagcgagccctaaacgttgctgactatcctcgaatgagcgcataatgccatcgtagctgtagtcatattgagcatcaaaaggcattggagtagcaaaaccatggcgaagctgcgttacatccgctttcgcgtctggtttaatgagtcttccaacttttgtggataatatataatcctgttttggaagttcccttagtgcatctcccactcgacgttcacttagtcctgcaccataacgcggagctgtatcaaaatagttgatacctatttcaatagccgatgataaagtttttttagcttcttcatcactgactggttgatataaattacccatagacgcagccccaaaacctaacgttgatatatttaggtttgtgttaccaagttgacgagtgttgaaaacgtttttcataatactcctaccatattgttcagctatttaactaggaaacttggtaagtccgttactttttcacagcctaattggttcattatctgcgttacctgcatcatcaatgcattaatggtatgaatgcctcctttatcacctaatgcgccaacgccgtatacaaaaggtctacccagaaaagtaaaatctgctccacttgctagggcactcacaatattagtgccgcttcgtaaaccgctatccataaatatctttatgtcttttgaatacttagatgcgatagtttgtagtggttttactggtgattcacctgcatcaagttgtcgaccaccatgattagaaattacgacagcatcagcgccaagttctatagccgatttcacatcttgttcactaattaatccttttattactaatggcccttgccacatatctcgtataggctttagtccctcgatatctacacggcccataactgttttattcataaatgctgcaagttcatcggttggcatgtctttaggcatatagggttttagggtttgcatttcaggcttgccggcaagcgctgtttcgtaaaaccaacggggtctacttagcatttgcatgatgtttgagagtgtcattttaggtggcatcgccaaaccattgcggatatctcttgggcgatagccaaatgttggcacatcaactgtgacaaccaatacagggtagtgtgctgcttttatgcgacttaatagatctttacgaatgctctcatctgttgggttgtataattggaaccaagcatgaccctcagacacttctgcaatacgctcaaggctagatgacgaaacagtacttaatacataagggatgtttttttcagcggcagctttagccagtatctcaggcgcttttggccacattaggccttgcaaaccaacaggtgcaattccaaaaggagcagagtaggtgtggccaaatagttcaactgattgatcgctgccagaaaagggctttaataatgtactacgcaattgtacagcattgatctcgtctcgatttcgctgaacacttcgctcttccatacagccaccttcaaggtagtcaaatgcaaagcgtggtatgcgttgtttggcttttttcttgaggtccgatatatcagggtatttatgattaaagtaattattcatgatgatgtcctctgctcacattaattcaagcaagcaggtcctatgctgtcgaaagttttataagttaacaaaaattcctgatgtcccatttgttcagatttactttgttcaccacttgcaatgcggacaataagatcaaagatttcatctcccacttgctctaccgttttctgaccttcgataatacttccagcatttatatccatgtcatcacttaagtttttgtatgtttcagggtttgcgcagattttaattactggcgaaatagctgaaccaacaacggagccacgaccggttgtaaataatgtgatgtgggcacctgatgcaatcatttcgatgatttcttgattatcagaaatgtttggaaatccaaatttagggtctccatcagggactacatccatcaagaacaagccttttttgtggggctcttcacccggtttaataatgccattaattaacgagccacctgacttagcataagctcccattgatttttcttcttgtgttgttaagccaccctctgcattacccggagcaaagctgccatagcccatttttgtgtaatatttctcagcttttatgacacaagatacaagcttgtctgcaaggtctttcgattcggccctttgcgccattatttgctcgcagcccacaagttcgccggtttcttcaaaaatgcaggttgcattttgcgtaattaaacggtcgaaacacttaccaactgcagggtttgcgctgataccactggtgccatctgaaccaccacagattgtgccaataactaattcatcaaccgtcatatcaacaacagggcatgaagaaatttgttctagcatagccgcagcttcttgaacccctttatcaatggtgttttttgttccgccgttattttgaataacaagcgtactaacgggtcgaccagactgactgatagcttcacttaagtgttcacggttgaacccttcacatcccaaagaaacgagtaacacaccgccaatattagggtgggtacacagtttagtcatcatagaaagtgcataattgtttggatagcagccaggaaagccaataagttggatgtcttggttatttgacttattaacgattgttcttgccacatggtgtgcacattcaactaagtaggctacaaccacagtgttacgaataccttttttaccattacttcttaaatagccctgcatattaatctccactaactgagtgcctagtgtggcttgctatatagtcactcttcatattgtgaaggtgcacatgctgtcctttttcaatatcgtcagtggcagatccgataggcacaccgtattttaaaatttgttcgcctttttgaattgcacgacaggcaactttatgaccaacagtgacatctgtatttagcgttagctcatcatttgcaatggtgattgcttcaccaaggtatgcagcctgacaacaaacaatgacgttgtcttgttcatgcagtaacacaaatttatttccagacattcaatcctcacaattaaagtttgttggtacactagtaatttattttaagtataaattattttttcatatttaaaatatttgtaatgatttaacaagtcaacatctttcttttgtctctagccactgtcatttgttgctacagccaggaacctttaaaaaaatagtaaataaccaattgtttttaatagacatattcaaaataatatttttcttatatgaaatttaattgtatatatgaatttatcgtgcaatcttttaaacatgaactgtactaagcagttcgtattaacagcatctaactaagagcgtaattaacaatgaacacatatcaattaggtacaaaagagggaggggaaactgcaccattaatcgcaacggatatgctgataccttttattctggttgcagcactttttcctctttggggctttgcaaatgacattaccaacccgctggtaaaagcgttcaaagatatttttctaatttcaaatgcacagagttctcttgtgcaatttgctttttacttagggtatggagtgatggctattcctgccgcattgtatattcggcgttattcttataaatctgggatactacttggacttgggctatatgcactgggtgcattactatttattcctgccagttattacatggaatttaattattttttggcttctttgtgtattttaacctgtggattggcactcttagagacaactgcaaatccttatattttatcgatgggagatgagcggacagccacaaagcggttaaatttagcgcaagcattcaaccctgttggttcgttgatgggtatgtttgttgcttcaactatgattctaaataagcttgaaatagaacagtttagagctgaagaaaaattacaacatccagaatatgcacattggctccccgcagttgttgatgaaaagcttaccgaagcactttataccttttcaaaagaagaaccatttaatcatatggcgatgcaggcagctgatttggcgacaatacgcgacccttatgtggtaattgcgatgattgttattgtcttattttttatctatttattttatcgcttgcctaatacacaggctgttaaagtaaatcaaagtgacaatagcgcgaaggaggtttttgtaaaacttattaaaaataagcgctatgttgaaggtgtgattgctcaagttttttatgttggtgcacaaattatgtgctggacttttattatccattacgggatgactgaagtaggcttaaccgcttctgaagcgcagaattacaacattgttgctatgtgtgtttttctggccagtcgctttatttgtacgtttttacttaattgggttaacgccgcattactgctgatgatctttgcaattgctgcagcgagcttgacgtttgctgtcatttttaccgggggcatgctcggattgtattgtcttattgctgtttcggggtgtatgtctttaatgttcccaacaatttatggtatcagtttaggcggtttaaaagccgatgcaagtatcgcatcctcagggttggttatggcgattgtcggaggagcgctaatgccacctctacaggggcagatgattgatgcagggccactgattaagtcactaagtgcagtacaaacctcttttttactacctttaattagttttatggtgatagctgtttttgcttatcgcgttatctatatacataaaacatcagtggagaaatgaaatgcaatattgcttaacattagagctagaaaacaacgatgatttaatagccgaatatgagaaatatcatgccccgggaaatgtatggcctgaagttgtagcggcaatcaaagaagtgggtataacgaacatggcgattcatcggctaggcacacaattaattatgatacttgatacctgcgatgactttagttttgaacacaaagccagattcgatgctcaaaatagtaaagttcaagaatgggaagcattaatggaaaagtttcaaaaggttgatacgtcatccagtaaatctgctaagtggaagcttgttgagcggattttttcactggatgaacaaatagcagcttattaaatggttatggcgctttttctcataaatgaaactaatgtatacttttgtaatctgaggaaattttatagctagtctcaaaaaactagtgagttatattaaggtgaatatcagtggaaaaagaaacggattctaaatcacggaaaaaagtgtattcagctcctgcgcttgaaaaaggattggatttgcttgaattgctgtcaagtgaagtagacggtctcaatatcacggatatcacagcacgactcgatcgttcggtcggcgagttgtttagaatgttggcggtattagagcaacgcggctatattgaaacgccagcgggaagtgataggcatagattaaccttaaagctttttgggctagccaatcggtttccacctattaagcgtttaacatcgctagctaaccctttgatgcacagattatcttataccatagagcaatcttgccatttagtgatctactacgagggtaaaggtcatgttgtagtgcagcaagattcaccttcggcgcgtatctttagcgttagacttggcgctgaagcacccttagtaaatacctgttcagggcatttattgttggcgttttctgaacgagaaaagcgtgatttaatgctaagtcgtgtgccaagtgaccacccacaagcaaattctgaacaactcgaggatataatcaattgcgttaaaagtcagggttatgagagtgtgattagtgcgcaagctcatggagtaaatgacattggttatccggtgtttgatgccacaggtcaaatcgcagcggcgttagttgtgccatttattgatttcactgacggatctcatacaactgatatggcaatgatccacgaaaatatgaaggtaacagctttagagttgtcgaagctattagggtatgagtgatcccaattatcaaattagaatatttagaattggtacgactgagtggattcgaaccaccgagctttggagcgtgtcataaagagtggtagtgcgctaaccgacttagctacaactgtacaattcagattttcgggtaatatcttagtaaaggttggattaaatttggtacgaccgagtggattcgaaccaccgacccctaccatgtcaaggtagtgctctaaccaactgagctacggtcgtacagacatttaattatgaagtagattaaatattttggtacaacctagtggtagtgctctttcctttggttatacctaaatcgtggtacaaccgagtggattcgaaccaccgacccctaccatgtcaaggtagtgctctaaccaactgagctacggttgtattttgatttaaaaagttgttagcttggctaaacaacggaggctaatatatagcgactgcttgtgtgaatcaagcagctttagctatttttatgttaagtgctggttttttactcataacggactaatttcgcacgctcgataaaaaccttgccaccaagttacatggcttttagcagagcgcttaagattccgtaaaattgcctcattactttcgctatctactaatgggctcatttcagtgtcacgccatatctgatgataaagtggttgtagggtttctaatcttcccaccaagaatgattgataaggttgtaactgctccaaataaaactttttaaacacattacttagcgtttgtgctttttgtttattcttgttggcaggacagagttcatcatttgtgtactgcattagcagctctgttaattgttgattgtaatgtgtttgggctcgagccgccgaaattaacagcttgttgtatttaaaacggtttaacacttcaagttggctgatgattttatcgggctctatatcgtttattttgccggtattaatttgattgtttaatttagcaatctgctccaatgcgctcacggtttcgctaaaacctgacgtattttcatcaatataagtcgaacttagctgccagctttgtttaaactcggtttcgttgaacagcatagctttaaagtagttggctaagtttgcttgtttttttgctgcggtgagttttattttttcaaaaagttcatcttgttcatcaatgcgctctaagcatttatttgcgttttgtataaacttaatttgataactcaaaacattagcgggtgttgccgttttgccaagctggttattgtgctcagcaatcagagttacaagcttacactgacgtaactgggcaagttcaagcatgccgatcgttgctttgtattcatcgtcataagcgaagtgcttaacagttagcgtgcttggtttagatagcttaaaaccttcggttttaagcacgttatttagtctttgcgcataggtgtgatttacatcaccagaagagggtgtgcaggcaataagtgccacacacactagagcgataatagagtttagaaggctattggttttgcaaaaatggtgcatgtttaaatcgcctatgaacagtgaacatcaacataattgctgcggcacttaaccccacaataatgcctatccaaaagccatgagggcccattgctggaacaattaaatctgtacgagcaagtacgaatcctagcgcaaatccgatcagccaatatgaaacaaatgttatgtagccaataggggctgtgtgctttaatccacgtaaaatgccgttagctgagacctgcaaagcgtctggcaattgatagatacaagccaataccataattgaagaggcaagtgctaatacctcaggattatctgaatacaattggctgatgatatcacgtgcaaagaaagtaatactggctagcataaatgcaattacagctgccagaatatagctagttcttactgcatttcttaattgctcaaagtgctgctgaccaaataaattgccaatacgtatacttatcgcaattgagaggcttagtggcatcataaatagcaaggtggttacactggctgcaatctgatggccagcgactgcgacagcacctaaatgagctataaataaaggaatacaagcaaataaggttacttcaaaaaaggtagcaagtgagataggaatacctactttggtaatgatccacattgttgagaattttggtaatgcaaaattagcgaggagttctttagcgttcacttttttactgaaatgacagtaaatgacttgagttagtgccatagaagtaaatacaagtgctgtggctataccgcatccggcaccaccataggcatcaaaccctaatttaccgtggataaacacatagttagcaggaacatttacagctaaaccgattaggctgatatagaaggctggctttgtcatacccataccttcagtaatattgcgatacacgctaaatagcaaaaagcccagcattccccatttaacaaagtaaatatattgctcagccagagatgtaatcgcagcgctggtgtccagttgatttaatacgctatcagcaaaaccagcgactaagacacctatgaaactgagtatcagtgctaaatataagccttgttgaaaataatgactaattccttgtttatcatttgaacctgaaaattgcgcaataattcctgtaagcgcaagtaaaattccttgaagggcaagcattaatgggttccagataccagttgcaattgataaagcagctaagtcaattgcgcttacttgacctgccattactgtatcaaccacagtcattaaaataagtgtaacttgcgccaaaaacacagggatggctaaagaaattaagcgcttggcttcccaactacaaaaaagcataaaaaacacacaactaaaaaaacagacaaacattgtaatctattcatagatcaataaaaatcgcagttatctatttagtgaagaaaagaagtgttgctatgtttaccggaattgtacaaacccaagctattgtaaaaaaagcgattcacgaaggtggaattttacgactcactttacaggtagctaatgactatgctgctaacttaactttgggggcgagtattgctattaatggctgttgtttgacagtcgtgagttttgaaaaacaatcagcagagttcagttttattgattttgatgtaatagatgaaacactaagactaactaatttaggtgcattaactgagcatgacacagtaaattttgagcgttcagttacctttggcacagaattaggagggcatattgtttctggtcatattcattgtatggcagaaattattgcaattaatcatgatcaaaataattgtaaaatgcacttatcactagcagctgattggcaaaaatacgtactctacaaaggttttgttagtgtgaatggcgcaagtttgaccgttggcgaagttgatgaacagggcttttggttgcacctaatcccagaaacactcgcaatcacaaatttagataagtacagtgttggtgataagcttaatatcgaagttgatcaacaaacctataccattataaacaccgtagaaaattacctatcccaacaagaacatagcaaacgagcaaattaaaaaatttgctcgtcgtcgctgtcaacgaaaagttctagtttgttgtgtgcgtaatcaatatgcatatttaagtggatcgggttacagcatgcgctgcaatcttcgtaataatcctggtcaccgtcgcttgcatcaagagcaacatgtatatggtggccacaatgagggcatgaaatacgttgtgtgaaatgttctttcatcagcttttaccttaatcaggcatgcctgagttcgttaaattgcaatcagaattaaaccttaacccatgaaaaatgaatctagatttaatcagattggtataacttactaaccgctaaacaagcggctagcacctgtatctgaacgcgttataagtaaactatagccacgattaacggtttatgacattcgttttacaacgattttaatgttatttaaggagtaattcgatttgttgttttgcttcagtaagatagtgtcctgcaaaaatgtttgcatggttaagaacagggtaaagttgatagatgagttttcgttgctcatatccagattgtaatgggtataaggcattgtatgcctcgtaaaaggcatcaggcagtggagcaaataattcgctcattgcgatatcacattcccgatcaccataataacaagctggatcgaaaatactgggtacggtgttataaaaccccatatttcttcgccaaaaatcaccatggagtagagatggttccactacatggctatgcagtgcatctttaataaaggcgatgaacatttcttggtttactaactcaatgcctttttcttgtaacaattgcagttgccagcctattcgttcctctgcaaaaaaaacatcccactttctgtgccatcgattgggctgaacagttggacctaaaaagttatcattatcaaatccaaacatggcttgagtatgtttttgatgaagcatggctaaatgttcacccatttgataccaatttgaatgtggttgcttatcaagttctaaccattctagaacgatgaatgaatactcaatgttacaacctgtagtgatgcaatcgggtatcataaataaactctcttgcgtgagcagctctaaattaaaagcttcacattcgagtcgctctaaatcacttaagtgagccaccttaacaaagaagtggtgtagatcatcaccaatatggaagtatttatcgttattgggtgattgtaactggcgtttaaaagtatgcttaaactcaaaatgcatcgcttggcttatctgctcattcaccgaattccacataattctgttcaccttttaaccatataattaaactatggcaaaaagacggtgaattaacaaacccatggcgttaatattattaaagtttagtaattaatttacgaggattcagatgaataaaagtctcatcactaatttagtggcagttgcctttgtattagtcggatttttatttgatcaaacagttgtcttaacggttggtttatttgccttatctggggctgtaacaaactggcttgcaattcatatgctgtttgaaaaagtcccttttctttacggttcaggcgtcattactcttaaatttgcctcttttaaagttgctatacgtaacttagttatgaccgagttttttgcagaagagaaaattgatcaagtcatggctttagcgaaacctaatattgatcttgagccagttattagtgaagttaatttaagtccggcttatgattctttaattgaggtcattgaaaactcacaatttggtggcatgctgtctatgtttggtggccgagatgcgttagagcctatgcgtgaacctttcattgaaaaaatgaaagcggcggtgattgatatatcaaagagcgacgaatttaaaacgattcttgatgaaaagctatttgccaactctcatctaggtgggtcattacatggtacagttgagcgtttagttgatgagcgtttaaatgaacttacgccaactatggtaaaagatattattcaaaccatgatcaaagaacatttaggttggttagtgatctggggcggggtgtttggcggcttatttggtcttatcgctgcgttaatataatagggttagggtgtgtagcaggccggtatcggcctactacttagaattcatcataattatttagaaccagcaataacaatgactgtatcgtcagatactttagcaatatcttggatactggtttttgttgttgtttcaaaattcaaataacttgctgatttattaaacccataggtgctagcaaacttttcagtgctcatttcattacactgtagcttttctgtcataacccgtttgcttaagcgtaaatcacgcattgtgtttattacgtttaatggtttgtttgaagcaattgccatacacgcttgagtaccaacattgtcatctgctgctacaaattgtgcggcgtttgtttctgttgctactaatgaagaacctaaaattaatgctgtaccgagtgctgttgttaacgtattcatctttctctccagttgtttgtccatgtgacacgtcatatgtgctacctcgctttggatactgcacacttcctatttgctgggcacagttaaagtatgcgctaaccgagagtaattgctgttaatgaaaatcgacaagttgtaagtaagtatgtagatgtgaacaacaaaaaataaccgcttgataaggtatatttttaagtgtgaactttgacacaattcgagaaatatttttctatttttattattaaaaaatctttattggctagtattaaaggtttggtttttacgtgatggttacatttgcgttttaactctacattttttagtcgcgctatttaaagtataaggagtaccagtggccacgaaattagcaggctattatcaacaagcttatgcatctgaatcaaaacattttaatcaatgcttctattgcggttgtgaagccactgagcgagatttttgcccaccactacatatgctacaaagcattatagatttaggtgaagacgcagaatttatatctattccagcatgttatgaatgttttgcgttactacataacgaacggatactgaccattgatgggcgagtgacaaagcttaaaaagaaactttcagcaaaatacgctaaagcgttgagaatttatcacatgtggcatgaaagtgagcttcacgatatgagtgatgaatttgtacatagcattaaagcaggtatgaagttaggtgcagaggctgcagagcggcttgcatttcaaggttatagttatgcaacagaagaggccagtgtaactattcgtcaaaagcgtgctgaatttgatgtgcaaggcaaagtcttttatgactttaaagacgcgctaaattactgcattaacgatttgaacgtagacaggacagaattctataagctggtggttgaagattataacggtgattttaatcgtgctttaagccaatatcgccatcgccacgagaaggtaacagcagcaaacgatgctgattcactgatcaaaagttttgcgaagcagcataaacaaaattcagactttgtaactcgcactgtgaagcattttattaacaaagatccgagtttaactaccgaaggtgctttagagcagctatataacaattacattaaaaaatagagcaaaacaaaacaggtaattcgtcccaataaactgctacttgcctcgtttgttcgcattgaaattaacatttggttaaagtggttcaataataaaaaggagaaacaacataatgcaaaaatttgctccatccgtattggtcatggcgcttggtgtcgcgttagcgggatgccaagacaatggccctcaagatccaaaagtaactataaataaaaacccatacccaagcacctataagcctcttgcatcacaaagcacattgatcacaaatgcaacagtactaactggcacaggtgagcgcttagatgatgcagatgttttctttgttgatggcaaagtacagcaagttggtaaagatttatcagttcaagctgataaaacgattgatgcacaaggcaaatgggtaacaccaggtattattgatgtgcattcacatctaggagcatatccaacaccatcggtggcatctcaccaagatggtaacgaaatgacaagccctgttacagctgaagtgtgggttgaacactctgtctggccacaggacccaggttttaatcgtgctcgtgaagggggcattacgtctttacaaattctaccaggttctgcaaacctgattggtggtcgtggcgtaacgcttaaaaatattccttctcatacgatgcaagggatgaagtttcctgatgcaccatatggtttaaaaatggcatgtggtgaaaacccaaaacgtgtttatggtagtaaaggtgttttaccatcaacgcgtatgggtaatatggccggctatcgtacagcttggatagaagcagcagaatataagcgtcaatgggaaaaatacgagagcgattatgctgcgggtaaaaatcccgaagtaccgcatcgtgatatcaagcttgataccttagcgggtgttcttgatggcgagatactcattcataaccactgctacaaggcagaggaaatggctatgatgatcgatcttggtaaagaatttggctatcactcaggtacattccatcatggtgttgaagcttataagattgctgatctattagctgaaaatggcaactgtgcagcactttggccagattggtggggctttaaaatggaagcctacgacatggttcaagagaacgtagcaattgttgatgcagttaaaaattcatgtgcagtggttcactcagattccgacacaacaattcagcgtctaaaccaagaagcagggaaagttatgtaccgcgcaaatgatgttggttataacatttctgaacaacatgcaatcaagtggatcacatcaaacgctgcgaaatcactaggtattgatgacaaaacaggttcactagaagcgggtaaacaagctgatgtggttatttggaatcaaaacccattcagtgtttatgcgaaagctgaacaagtgtttattgatggtgccaaagtttatgatcgtaatgatgataaatatcaagcacaaagcgatttcatgctaggtcaaaaataggagtaacattgatgacaaaattaactcaatcattaaaactgtctctcgttgctgctagcctggtctcggcaactgcgagtgctgcatctgtagcgattgttaatgcaacactgcacacgtcaacagaacaaggcgttctagaaggcgcgagcgtcgttattgacgaaggtaaaattgttgcaatcaaccctgcatctattgatgctgatacaaccattgatgcaaaaggtcaaattgtaaccgctggttttattggcacaatgaatcaattaggtttagtggaagtgggtgctgttgctggctcgcgtgatggtggggatgataaagcagggattgatttcgatcctagccttgcatttaacccgcgtagtagcttaattccttatgcacgtaaaggcggcattactcaggatctaatcgtaccaaacggtggtgaaagtatctttgcaggtcttgcctctgttgttgatttatctggtagctttgacagcgtaaataaaaagcaagttgcacttgttgttcacttaggtgaaaagagcaaaggttcccgtgctatgtcgatgaaaacacttatcgacaagttagaaggtcaaaagtcagccaaaaaggatgacaaaaaagacgacaaaaaagagccttcgactgaacaaaaagtgttagatgcagtgctagctggcgaaatgcctcttattgcaagcgtgcagcgcgcatcagacatctatgaacttgttaagttaaaacaaagctatggcattaatttagtgattcatggtggtgatgatgcggttgttgtggctgatacgctagctaaagctaatgtacctgtgatcatcagttcaatggctaacttaccaggtagctttgattcattacatgcaaaccttgctaacgcaggtaagcttgaaaaggccggtgtaaaagtcattattggtgtagcgggtgattctagccacaatgtataccagttacgctttgatgcgggtaatgctgtatcttatggtatgagccagcaaggtgcactaagcgctgttacaagtaacattgctgatgtatttggtttaaactcaggcgcaattgcgacgggtaaacgtgccaaccttgtaatgtggtctgcagatccatttgagcttaattcacacgtcagtaaaatgtggatcaacggtgaagaggtttcaaccgaagcgcgtcaagataaactacgtgaacgttatacaactgattcagcgatgccacgtgcttatacaaaataagcgcaagagcaattagagaaaaggccgcgattgcggccttttttgtatttaaagtctttatattaccaagtttacaagcttatagaggcttagcccgaatatcagcaataatacaggtacaatcacaaggttaactaacatcgagttggtatgctctttcattacagatttttgattcactaaccaaacaaggtaacaagtaacaataggtaataataaaccattggcagcttgtgcgaagatgatcaccgcaacaggatcaagccctagcgatgcgacaaaagcaccaaaaagcaaaataacaatagcgacaagcttaaaccgtgtatcgctcatttgtgttgaccagccaagcataccacataccgcataagcaccagcgagtggggcggtgatggcacttgtaaggcctgcggcacacaaaccgatagcaaagaaataatgagccatacccccaagcagaggctcaagttgcacggccatattagcagctgatattttatctgcgtcagtcccgtaaaatgccactgaggccgttgataaaatggctaatgtgattatgccacctaaagtaatcgaaataccggtatcaagattcgtttctttaataactttatcgatgtcttgtgagctatcgtgtttttcggcaagtacccctgaatgtaaaaacaggttatagggcacaatagttgtgcctatcaaggcaagcaccgtagtaattgaatcatcaggtagactaggtataaaacccttcataacttggccaagaggcggtgccgccatcaccagcgttgagataaacaccaagctcattaaaactactaaaacaatcagtgcagtttcaattactttatgtttacctgtgtataataatgcagcacttaatagtgcaataagaggtgtccagatcaatgggtttattgatgggataatttcttgtaaccccatacttgcaccagtcaaatttcccgcctcgtaagctgcactgccaataccaatcgcactgatcactaatatcgcagcaaggactttaaagatcggtgtttgaatagtggttctaagtgcagttgctaaatctttcccagtagccacaccaagacgagcagccattgattgcaacaaaatagtcgctataacagagaataataacgtccaaataagagcaaagccaaaattagcacctgcaacacttgcagtggtgattgtacctgggccaataaaagcggcggtgacaagaagtccgggacctaaacgcatgacaaaaccttttattattatttttagtgcattaacagtttaaacaaagcagatcttaagggtatagagagtatttgcaagggtaaagtaaaagagatgagtcgtttagcgttagtgtgttgaacttataactaatccacactgtaatttttatacactttacgtagtaatggcacagcatgtttgctttaaatatacttaatcattataaatcaggtggttatattaactggagtattggttggattattgcaaggtataagcatatttgttattagcaaaaggaaatgaaaatgcctgaactcactttttcagcttacgcggctgtgtatgtttatctaattatgttgactattcagtggatagttgcggctgtgactaaagcaaaacaacccaatgcggtgccaggtaaactcgacagttccttgagtcatgatagttttgtgtttcgcgcgcatcgcacctttatgaatagcctagagaatagcccattatttttagccactgtgtttttaggtttttttcttaacttgaatagcatggcatttgctttgtgtatctggatatatgtagctgcgaggcttatccatatgattctgtattatgcgatagcaacagaaaagaacccaagtccacgcagctatttctttttgattgcagcaatggctaacatggtgatgttggtattaataggcttacgtttattgtaaaagggtggtgaggtattgtgattcaatgcctcacctgagatttatttaaattgacaaagtcattattcgatatttattaaaacactgctaatttctgtgtcatattgaacagtgatcaatgctgttcccaatgtatttgaggtacttgtaactctgtagccggcttgagctgtgcccgcatttactaatttagtcgttactaggttactgttattaatactccaattagcaaactcagttacatttaaagatgattgatttgagctgtagttagcgaacaatttgagttcaatcgttcctaaaggagaaattgaatactcgctagagccatcattaatttctaaagaatcaagttcagcgtcaccttcaatttgtactgttgtaatcttttgcttagtaccacaatcggctaacagttgcgtggtaccaggtttaagtgcaagaaaactagctgtcgaatcactatcgtcaatactttttggtgttaaaccaataaagttactgttgattgcagaccacttgatacttgagctaatgtcttctgtttgctctgaattgccattttgatataccgctttggcagcaagttggattcgatctccaacgctgatgtttaactcactatcttgttcagaattaaacgaaacattaatttcttttaaattgctaggatctgcaacaacagataattgatcggtaacattgccaattgcagctgtaattacagtgctttcaacagctgcagcagatgtatatacaaagccttgctgattgattttggcagttgtattttcatcgacacttagatttatatctctcaagctatttaatgcagtatatccatcaacgtaggttatatcggccgatactctcgcaggcgtgcatgtattgatagagcctgttgcaggaatgacttgttttaaattaattgattctgccgccacatctgcaatagatatttgtttttcatcactaatatcatttatagtcgtcgcggatatagtaattaacccttggttcgatggcgaattttttagagcagttaacaagccattactattgattttagcaatactctcgtcacttgtttgccaggttatttcattggttacgtctctagattcaccatttgaatctatacccgttactttcaattgatgggtgtcaccttcttttaaacgaacttggtagttttcaatactaagtgactcaatgatagtgccttcttggcgtaacttttcaagttcaacttcttttgctaactgagttgagtcagtttcagatccgcaacccaaaatagcgctaacaattaaagagatactgaaaagttttgatacgttcaactgcgtgttcatgaaaatccttgcgattagctatttaaaaatggtaagtaaggccaagtgttacaccactgatttctacgtcgtctcctttgaataaagattggtaggctaatctcacttgtgtatttttgatataaggtatctgttggtgaactgctactccccatgcaaagccatcataattataatttgtggggagcttttcagatgctgaattaacgatcatttcgttttttgcatagcctaatgaaatatcaagtccaaagccgttaaccacatcagattgcataacaaaaaagagtgcggcgcttttttcaagttcaaactctaaattgtaaatgttgtcgtcatcacttgatattaagtactgtgcctcaaatgccatattattgttgctggcgcctgctcttaagaaggtagcagttggtttagcactttcactactaatttcaatatcactgagcatatagtcagcacctagataatacgtatctgccttagtctgaaaactagcagcaaatataaaaagcaaaatatactttttcataatttaatttcttgtgtttatattagggtcgatactagcgtttagtattagtggaatcaagcagcgtaattgttaatttacatacaactggttgaattatatttgaaactgtaaataactagcttgcagatacaagtaccagttagctagttaaatacagcaaaaacttagttactcaacaccaataaaaccaccggtttgatgtgaccacagggcagcatagatgccaccttgtgaaattaattgttggtgagaaccttgttcaaccacgccaccttcatcaagtacaatgagtctatccatttgtgcaatagttgataagcgatgcgcaattgctataaccgttttacccgtcattaaatcgtctaagctggtttgaattgccgcttctacctctgaatcaagggcactagttgcttcatctaatatcaaaattggagcattttttaacagtacacgggcaatagcaatacgctgtcgctgaccacctgaaagcttcacacctcgttcaccgacttgtgcagcaaagcctttattacctttgctatcttctaagtcttcgatgaactcaagtgccttagcttgctttgcagcagcgagcatttcttcttcagttgcatctggcctgccataaagaatgttgtcttttacagagcgatgtaacagcgaggtatcttgcgtcaccatcgcaatatgtttacgtaaactttcttggcttacatctgcgatgttttgaccatcaatacgaatagtgcccgagtcaacatcataaaagcgcagtaataagttcactaaggtcgacttaccagcgccagaacgacccactaaaccaattttttcacctggttttatatcaaggtttaagccattgataacagggccacgatgggtttcgttagctgctttaccatagttaaattgtacattctcaaagcttatagaccctttatcaacgttaagggtgctcgcatctgttttatcatctacttcaatcggcgttgatagggttttcataccatcagcaacagtaccaatgttttcaaacaggctactgatctcccacatgatccattgtgccataccgtttaatctaagagataaactcactgcaatagcgatagccccaacactgatggcactaatagaccacagatacaatgacaaagcggcaatgctaaataccagcaaataattaagagtattgatagaaaagttcaagctggtaactaaacgcatctgcttatataccggctgtaaaaacacatccatgctgtcttttgcgtattgctcttcacgttgcgtatacgagaataatttgattgttgaaatgttagtataactatcaaccacacgtccggtcatttctgaacgcgcatctgcctgcgagctggctacttttttgagcttgggtacaaaatacatctgaattgcagcataaaggactaaccaaactaacaatggcagcatcaaacgccagtcagattcagcgactaaaaataccatggcaccaaagtagactacgatatacattagtacatcgagcagtttcatcactgactcacgaacggctaatgaggtctgcatgacttttgtcgcaatacgaccagcaaattcgttttgataaaagctaacactttgacgaagcaaataacggtgcgctagccaacggatagacatagggtagttacccagtagcgcttgatgtaacactgctgagtgaaaaaatacaactatgggcaatactaccagcagcacaattgccatttttgtaagctcagcctgctgctcaacaaaaagggtattaggggtgtattgaccgagccaatcaactaattgccccatataactaaaaagcgagacttctaaaatagcaagtgcagctgcgcttaaagacatcagtagcaatgaaagttccatgccacgggtataatgacgacaaaatgcaaataaactattaggtggttgagatggttgctctttcggaaacggattagtcatccgttcaaataaacgatacatagacgacgctttttaaaaatcaaagtagcactactatatcatttgagtggttttttagcagttcatttagctcaaaaactcagatcaaaatctatcctctattcagttatttacatcttctgtgagaagtgaaaatataataagaaaaaggaattaattatgaaaaagttgctctttacactttcgcttgttattagcttaccactttgtgcttatcaaaccgaaacccatacatttaagggtaaacaaaccgccattgagaaacccgttacggtaacgttaccggatggctatcaagaatctaataattacaatgttatttatgtattacatggctatagcggcaaccatactgattggacaaaactaacagatatcgaaaaacttgccgatcaatataacgtcattatcgttaatcctgatggaaacttcggctcttggtatctcgattctgacatcgacaaaagttcgcaatacgaaacttacatcgctgaagatttagtcaattatatagacacaacctattcgaccaatcggtctaaaagtggccgtgcaataacaggtttatcgatggggggatttggtgctttgcatattgccattaataaccaaactcgttttgccgcagtatcgggaatctcggcaggtgttgatgtaagaccgtttagtgctgaatttggccttgcaaaagtattgggtggctatgccgataatcaagaaaagtgggataacattgccattattaataacttacataaaatagctgcaggtaacacagcgtggaaaaaaggcgctgatactctcgctatcatgctcgatataggtgtagatgacttctttgtagagcaaaaccgagcgctgcaccaagctatgcttaagctgcgaattcgtcacgattacatagagcgtccgggttctcacgattggcattactggaataaagtaatcccttatcagtttctgtttttaacaacacatatggggcaataagatgatgttgcaacgactgctgtttttaatggcgcttagcttttttggatttattggttgggtaatttatttagcaaatacggggcaaaaatcactgctttttgatttagttgctgcaattccttatggcgataaactgggccatttttgcctgtttggtttgctgactttattcattaaccttgcgtttaaatttaaaactatcaaacttgttggacatgaaatttatttagcggtgctcattgtttccacgttcgttgtattagaagaatttagtcaatattttgtggcaacacgtactttagatgttttcgatttaattgcagatttcttagggattgctgtatttagcgcaatatcactttggcttagtaaaaagttatacccagttaagccctaaactttcagtcacttgcttggtttcgtctatacttattgcaaagcaaacaatttagtcgtgtatgaaccaagaaacatcggaatatttatctgatattatcactctcttattagatgctgtttgtgttgtagactcgaaaggtactttgctttttgcaaatccagcctttgaatctattttcggatacgcaccagaagaggctattaatagacagatgctcgactttgtttatccagaagacagagcaaaaacaattcaggctatcaacaaaatagtgtctagcaatgatgatccacgttttgaaaatcgttgggtaagaaaagatggcagaatagtccatgttttgtggtcagtttattggtcaaaagaaaaacaagtcagagtggcaatcgcttatgacattactgagcaaaaaaaattagaacaaaaattaatttatatggcaggccatgactcacttaccgatttacctaaccgtcattatctgaccacacaattagaagaatctttgtcaattgcgaataccatttcaacagtaataggcgtgttatttattgatattgatggctttaagcaagttaatgatatccatggtcatggagcgggcgataagctgttaaaaacaattgccatgcgtattcgccatgtattgaaaaaaggtgactcagtaggccgtttaggtggagatgaatttgtcgtggtattgaaaagcgttaagaataaaaatgacgtgatagaagccgttgataagttaaaagcagaaatctgtaaaccacttatctataatgatgcagagcttatttactcgccaagtattggtgctgtgttatttccagaacattatggcgatgcagagtatttaattcagtgcgctgacaaagccatgtataacgcaaagtacgcgggtggcaatcaggtggtgttttataatgatacgatgacattaccaggtacaaaatcatagtgtcacttacaactgagcagttaccttcaattcctacgattcttacttattttaaacttcacagcacctagacaaaagataaactcagattattcaacctaataatttgttttctaactcataactattgcgtgaaatgaaatattagttagccttgaattattcattgaaggagtgaaactatgttaaagcgtaaaataataacaacaacgggtgctttgtttagctcatcgctgtttttggtctcggcagctcaagccacaacacctcaatataaagatcaacaagctttgcatgatattgcaaatgcagtttcaaaaacgcgtatagagcaagatatacaaacgctggttgattttggcactcgccatactctttctgagacgaaatcagatacacgtggtattggtgcagcaagacgttggatcaagtctgaatttgaggcgatttctaaagcgtgcggaaattgcctagaaatcatcgaagtaaaagacactatttccggtgaaaagcgtattccaaacccggtagaggttgtcaatattgtggctattcagcgcggtcaagttgatgcgaaccgaatggttatgatgtcgggtgatattgactcgagagtgtctgatgtaatggactatacctcagatgcgccaggggctaatgataatgcatctggtgtggctggcgtgctggaatctgcgcgtgttttatcaaagtataaatttaatggctcaattgtttatgcagctttatctggtgaagagcaaggcttatttggcggtaaaattttagctaaatatgcacaagagcataattggcgtgttcatggtgttttaaacaacgacatgattggtaattcaaccggcattaatggggtaacagataacacaactgcacgtatcttctctgaaggcactcgcgttattgaaaccaaagagcaagcccataaacgccgttttaccggtggtgaggttgattctgcaagtcgtaaccttgctcgttacatagatacaatcgcagatcgctacattgaaaatctggataccatgttggtatatcgactcgatcgttttggtcgaggagggcatcaccgtccatttaacgatgttggctttgcagctgtgcgtataatggaaaccaacgaaaattataaccaacaacaccaagacttacgtgctgaaaatggtattacctacggtgacaccattgatcatgttgattttgcctatgcagcgaaattaacgtcactaaatgcagtgacgatggcatcaatggcatgggcgcctgcaccaccaacaggggtcagtatttcaggtgctgtaaagccaagtacaaccttggcgtggcatgaaagtgatgacccaactgtggttagttataaaatctattggcgttataccagtgagccacaatggcaatttagtcgtgatgttggcaaagtcaccgaagcaacactgaaaaatattgttatcgataactactattttggtgttgctgctgtgaacaaagatggaattgaatcaccggttgtatttcctggtgatgttggtgcatttgaatggccagacaaatcacctaaatagcaatcgttaagtcatagcggacaccaccgagttcgctatgggctgccgttatacgccaattatgggcttcgacaatttgttttactatcgcaagcccaatccctgatcctgattgcttaactgtatttaagtcaggcactctataaaggtggtcaaaaatctttgttaaactctcatcgctcacgccaggggctgaatcttcatagcggatcaatagctgtgtttggctttggctaatcgttaaattaatcttaccgggctgatgcgtgtacttaagcgaattactgattaagtttgcaaataactgtgaaagccttgttgcatcgcactcaaagtttaattcattagcaacattttgtgagaatctcacttcaaatttatcaagctggattgccatatctgcgtgtaagctttggaaatactcagctgcattaattgttgttacgttgagctgaaagcagctttgctctaaaagtgaaattttatttaaatcagtgactaaagttgccatatcggtgattttttggttgagtttttcgtatgtaagctcattaaattgagtaagaccagcttgcagagtttcaaggtgtaagcgcaaccctgttaatggaccacttagttcgtgggcaacttgtgataataacttactacgttggctgatttgtttatctagataattccggcgttgttcaatcagttgttttctttgttttactcttaataatgcaatgcccattacagctaaaagcaagctaaataataaaatgctgtataagattgtttgacgctgtgaggctatggcttggcttttttcatggtcttgcagttttaaattttgaatggccaaatctcggtcgcgaatagcaattgagttttgtaactctgctaaacgttgattgtagttgttatgggcaaagtttttttcaagcttcgtgatagtgcgttgatacgacaatgcttgttgataatcagcttgctgttgtgcaactgtaattagatgttcaagggcaaggatctgcttttgcagcctatttttttgattacttaattgaaaggcctgctgtgcataatgtttagcttgtttaagctcagtcgagccaatgtatagttttgctaatgtcagtaacacatcagtatataagtgatcgtcttctttcagttcagtgattacttgtttttcaattgctaatgcttgatcagctttatcaatttcaagcaaatttattgcaatattatgcttagcccaagcggtatttcttgtgctgttataactagcaaatacttgctgagcatcttgtgcgtattcaagtgctttagtgtaattgtgtagcccatattcgcattgtgataacttaactaagctatgtccgatatctgaaagtgaccccgtttgtctatcaaaactaagcgctgtaataaactcgctctttgctttttcgtattggcctaaatctaaataactttgagcaatcgaataggttatgcctgcttgtaatgaaatagacggtgacatctgctgaactagctcacggcgttttagtttatactccagagcaagcgttaaccggtctaactgctcaagattacgtgagtaaccatggtagagcatttctttttgctttaaggttaattcgcgattgttgtcgtgaatataaacctcaagcaagttcaaggcggcttgatactcaccagcattatgataggcactgacaaggctcgccacggcgtcaatttcataatcgctaagttgcaaacgctgaaatagcgcgacattttgttgagataacgaaattgcggtttctaagtcactttttctgtaggccagtcgtgctttagcaagatacaactcgctgtatataggggagtcgtttttgtattttgggcctgcttcaagctcatctattattgtttgcgcctgctgaaactgcccaagctgtatatgaacgtgaattaatctaacgttaaaactgattctttctgcaaggcttgcagattctaaaagttgtttatcgatacttaataaatactcatatcgtttttggtaatcactgattgctctggcttcgtcaatatggttttgcaatgatgatgcaaaagcacagttcattgataaggcaaaatacagaaaaacagcggctttaagtttcatagtcgggtttattattattttaaatcccaactagtctagcatgccatgcttttaaatgggaatgatttgcttttatagctaaaaggaattgcattatgcaattattcttctcgcaacttgcgaataatattggctagatttttataacgcattgttaaaaggcaatttattttttggaatggttgctgcttaaagtaattacacacccaaaggagagtgtaatgatgaaaattaacatactcatttacttaacagcggcacttgctaacggcttggtaagtgcagcaccatttgagctgtgtccaagtaaagcatttttaattcaggggtcgcccgcacagatgtatggtgttgatttagtatctgcgaaaacgacagtgcttgcagcagcaatggattttgcaagcgaagctaataacgacagtgttaatgcggtggggtttaattaccaagaccaatatatgtatggttttagtaagcaagcccctaaaagtgtggtacgcataaataaccaatacatgttagagcgtttaaatgtaagcggcttaccagatacgaacttttatgtgggtgatattttagttgatgagcagcaaaacaaggctgtgtattacttatatcatccacgctttggcctttacgccattaatttaacagcacaaaatgaacaataccaagctgaattaattccaggctctgctaactggaatctctctatttatgactttgcatttcacccgcacagtactcttctttacgctgttgaatcaaacggcgacttatatgagatcaacgttgaaaatggtggccctgtttttattacaaatctcgatattgcaggtgatacaggcgccaatggcgcagcttactttgatttgcaagggcagttttattttagtaacaatcgaagcggtaaagtccatagggttaatttaaacatcagccctgtgtcgggttatacaccaactgcgtctgtgtttacgttgggccctacatctaaccaaaatgatggggcacgttgtgctatagcagaggtaaaagttacagataactcgattgattttggtgatgcgcctagaccttatcaaacaacgttagaagatagcggtgcaagacacttgttcgatcctaatgaagaccaatctaaccttgtttatctcggcgcaagtgttgatggagaaaacctaaacactgccagtgatcttctccagtcatcagtagatagctctgacgatggggtcaagtttgtgactgattttgttgccggctcaacaagccaaattattgtcacatcaccaaatgataatggctatttatatgcttggtttgattgggaccaaaattaccagtttgatgcagacgaaatcacagtgagtaaatatcgccttaatcaaggggataacagtgttcttgttgatgtaccaagtaatgccgttatgggggcaacatgggcacgttttcgggtcacagacggtagcgaagcaaacccaataactgcaacaggtggggttacaggcggagaagttgaagactatcccattaatacctacggtagtcttgcttacccaagtgagaatggctgggtaactctggcttatgaagaccaatggcccttcgctggtgattatgactttaatgatttggttatgaattaccgtacaaagttgattgataaagatggacaagcgcttggttataaaattgaaggagatcttgtaggaataggtgctacttttcataacgggtttgcagttcgcctttatcaatctagcgctagtggtataaacaaacgcattttacgcagtcaaatagaccaagcatcaatcagtttaatcattaatggcgaacagcaaacacatacgatccttgaagaaggaacagaagacgcaatttttattgtgatgccagatacatgggcttatgcaagtaaagattctagctgtagttttttcagaacagaagcgggttgtaacattaataataaagttagcttcactttaagtgtgtcattaaatacttatatagcgagtgttgatgcacctaaatatacactggatccatttatttttgcggcagaaggtcattaccacggtacttttttagatggcttgaatcctcgcggatgggaggtgcatattaaaaaccaaccgccgacagaaaaatttaatcaaagcttgttttctttagtaggcagtgatgatgcaactaatactcagtttgggtattacttccaaacgccatctggattaccttgggccattgaagtggggtcgtcatgggcgcacccaaaagaaagtgttgatataacccaagcctatagtgagttccaaacatttgctgaatctgatggcagagaaagtccaatgtggtttaacaatgcaacaacatctaaagtgatttcgggagcacagtagccatgaaacatctattaattacaatgatttgtttaattcttacagcgtgtggtggtggcggtgaaggtgatgctgttaatgaaaactcaaatactttggcaacatcggcaacaacctccactacagagaacgaaacagcaactgaaacaacagtacaaacggatacaatgactgatttaactatttctccaacgtttgatttgtctagtaaagtgttactttatgttgatgttgatataaatatgggcaatccacgtgcgtatataaatatctgccttaaaggtgaggataacaaagcggattactccgaatgtttgttacgctcttcacttgtcgagagtaagttgaattcggatattatgcttgcaaactcagcggttgagctagtggctgagatatggttttacgatggccagcatgaaccaatgcgctatttttggcactttgatgcttcgcaagagtctcaacggtttgcgattcgttaaactaagtgatcgtttaaggctgtttagaagtttaatagttattaggtgaatacaatattttcaatagcttgaggagttaatatgcaatatctacaagatgtacttaaccaagtaaaggaagcaaatgcaaacgaacctgagtttttccaagctgttgaagaggtatttcactcgctagaacaggttgtgcaagacggggccgattttcaaaaacaggcaatattagagcgattagttgaacctgaaaggcaaattatttttcgagtaccttggcatgatgataaaggcaatcttagagtaaaccgtgggtatcgagtcgaatttagttcatcacttggtccctacaaaggcggtttgcgatttcatccaagcgtgaatctaagtgtcattaagttcttaggttttgagcaagttcttaaaaatgcactaacagggttacctttaggtggagcgaagggtggctcagactttgatcctaaaggtaaaagcgacaatgagatcatgcgtttttgtcagtcatttatgactgagctttaccgtcacattggcgaaaatacagatgttccagctggtgatatcggggttgctggtcgtgagattggttacttatttggccagtacaaacgaatcaccaatcagtttcaaggtgtgctgacaggcaaacctgaaatattggcgggatctgctttgcgaacagaagcgactggttacggagtagcgtattttttaagtgctatgcttgatgccaaaaatgattcattacgtggtaaacgttgtttagtatcaggcgctggtaatgtggcgctctatttaatggaaaaactagcgcagcatgacgcggttgtgcttacctgtagtgattcgcaaggtaccctatattgcaaagagggattagatgttgagttagtcaaacacctaaaacaagaaaaaggtgcgaagcttcgtgattatttaaatgaacacccagatgctgaatttacccctgtaaatcagtacccgagtgatgcccatcaagtgtggcaatatgaggctgatattgctttaccatgtgcaacacagaacgaaataactcaaaaggatgcaaaaacacttgtttcaaacggctgtatgaccgtgtgtgagggcgctaatatgccaacgactgcagacgcacttgctgtctttaaagagcatgatgtttacctagggccgagtaaggctgcaaacgcaggtggagttgcgaccagccaatttgaaatggctcagaatgccagtatgcagaaatggcgcccacagcaggtcgatgaaaaacttcaacaagttatgaaagaaatttttgatcgagtatcatcaactgcaaaacaatacgaccatgaaggtgatttattgttaggggctaatgtttcagggtttgaacgtgtttcacaggctatgatcaaacaaggcgctgtttgatatcacacactgctagcgcacaccttaaaatagttaaccataactccaccaaatagtagatttggcgttagagctcaatagtactgcaaataagttaaattgaattaaacgagttaaagctcagcatggctgagctttaatactgaatgcttacgaaaatgcgttttctttaagaagctcttgcatttgctcgcgcattttaaatttctgtaatttaccagttacagtcatagggtattcttcaacgaagcgaatatgcttcggtactttaaaataggccagcttatcttctaggaaatcacgtatagcattttcatcaagcactgcgtcatctttaggttggatccacgcacaaacttcttctccatacttttcatcacttataccaaaaatagcggcatcttgaatacccgggtaattataaagcacttcttctatttcgcgagggtatatattctcaccgccgcggatgatcatatctttaatacgaccaacaatagcaacaaagccttcttcatccattacacctaaatcaccggagtgtaaccaaccttcgttatctatggtggcattggttttctcttcatcattccaataacatcgcataatgcctgcaccacggctgcaaacttcaccaggaacaccgatttgttgaatatccccaacttcattaataattttaacttctgtatgtgctagtgcacgccctacagtcgtcacttgcttttcaagaggtgagtcagtttcagttacattgttgatagggctacactcagtttgaccatagcctattactacttcttgcatatgcattaatgagtgaactttacgcatcacttgttctggacatgtcgaaccggccatgacgcctgttcgtaagcttgaaaggtcataactgctaaactcttttagttcaagttcagcgataaacatggtaggaacaccatgtaaacccgtgcagcgctctttttctaccacctctagggttgttttagggtcaaaagaatctcctgggaaaacagctgtagcccctttacttatacaaaccaagttgcctagtaccataccaaagcaatggtacaagggcacggggatacacaacttatcttgatgagtaagcttcatcgcttcggccattaaaaagccattatttagaatgttcttatgggataaagtggctcccttggggttacccgtggtacctgaagtaaattgaatattgatatcctgatcgcaatgcaaagtggcagcgatagcatcaagctcaagtttatgggcttctgtagggcgttccattacatcagtaaagctgtacataccaggagagtttttgtcgccaattcgaataatattttttaaatgcggtaatttttttaggtttaatccatctgcaggtaaatggcttaattcaggtgcaagttcattaagcatttcaatatagttactagacttaaattgacttgcagtgatcaacgttgaacattccacactatttaacgcgtactctaattcactcggacggtaagcggggttaatacagaccataatggcaccaattttcgctgttgcgaattgggttagacaccactcaatattatttggtgaccaaataccaactctgtctcccggtttaacccctaatgataataaccccattgctaattggttaatttgttgttggtattctttgtaggtaagacgaatatgttgatgatgaaccacaatagcagggtggtcagggtaattgtcgacaatattatcaagatactgaccaatagtctgttcgattaagggtacatcggtgcagcctttaaaatagcttctcgaaagtggaagattattgttcggtgtgttctttgtctgcattgttttctccgtgtccggctagttagttgtcatggacttgatgcaatgcgtaatgaggtaatcaaaaacttgattctcaaaacgtgcgttcgtatctaactaaacacagattgtcgacaaagaaaagttttttaagactaatgtatatgttggttttttgtgggtaatacttaatgggcaataaaaaacgtgccgtagcacgttttattggaagttattgttcgtcttgtttgtaggttttgcgcataaggtaaacgtaggcgctaataaaagcattttcttgaaatttctttaacccagtatcttcgaaatcaataggaattggattacgtttaagttgctctttaattgtcgttgcactaaaaatttgtacatctaactcgtcaataagctgaatagcagtttccattttaaaccctttagcactgccagcaaatttaccttttggttgacgctctttaattgcaacagagtcaatttggtaatcttgcatcaacttcctaaaatcaaactgaaacttacgcattacttcagtgtcattgccatcacctaaagtgaagcgtgtttgtctgacatcacggatatcaaatacgtcattgtctttggttaaaatacacagtagtacatcactacccgtaatttctacaccgcatgttctcatggtcattctctaaataacttaatttgcgcaattatagcaagtaacgtcatgaaaaacagttgctttaaaaatgaatttttatagcaattgcgctgtggtcactgacactgatgtcttcagttgattgtgtagggtttaaatgcgctgcatagctttcatattccagcagtttaaccttagacatctggcagtcaggattaaagtgagcagaggccaatatataatcaagtacattccctttaccatgaaagtaatgactaaacggtttttcttgttgctgatgaaatgatgcactgaactcatagctatctgttaacccaacaacgggttcattgtgctcaatgcaaggttcacagcgggtagggtgaaagccttgtgtcataaacgaaagggttgggctggtaagtgaatcattaaaatcccccattactagcgtggcgcattgcttttctcgttgagtttttaaggcatcatagtaaacaatcgatgcctctagcgaacgagatatctgtgattgcatagccccaactgtttggtgtagtagttgtaaaagtggatcttcaagattatgaatatttaatatatgtgccatagactgcacacgttgtgatttaaaatgcacaacataacagcatacatcgccaaactcagggaatgaaaacaagcattttattggagtacggttaaatttaaattcattttgattatttaagtactcaagcatctctgggcatgggcttaatgcttcagcttttttaaatggaaacttactggcgattgcaacaattgggttaaataaaacttgtgggtatagggcatcttgagaaggagaatccacagttttaaaatagtcgtagcccgcttctttgcactgtacctctaaagcatgagcactaaacacttcttggaaagcaacaacatcggcgtttgtagttgataaaaagtcagcgacaaattgttgtttttgttgccattgagtattgttgtaacgctcgtgtaactgataaaaagaatagggcggcgcagtataatttagcaagtttaacgtagcaaacttgagcgtatgcatgtgtggcattatggtaaccttcgaagtacagacctcctaattatgaaatgagttaagtaattgtcaatttgctcgcataactacttgtatttaagtgcttgagcagcgacaatggccgcttgtatttgcgaagactcagtaaatacatgcttaattagcaatgcttattcgtaaaagcgttgcagagttattcaatttttttaaaaaatactacatgtgatgcattgtaggcatcaccactgtataaggatttataatgccagttattaccctccctgacggcagtcagcgtagttttgaaaacccagtaagtacttatgatgttgcaagcgatatcggtccaggtttagctaaagcaaccatcgctggacgtgttaatggcacacgtgtagatgcatgtgacttaattattgaagatgcgcgtttagaaattatcacagcaaaagatgaagacggcttagagattattcgtcactcttgtgcgcaccttattggtcatgcagttaagcaacttttccctgaagcgaaaatggctatcggtccaaccattgataacggtttttactacgatatcgatatggatcattctttaagccaagatgatttagatgcaattgaaaagcgtatgcttgaacttgctaaaacaaactacgatgtggttaaaaaaaccgtaagctggcaagaagcgcgtgatacatttgaagcacgcggtgaaacttacaagatggaaatcctagacgagaacattgcaaaagatgaccgtcctggtttataccatcacgaagaatacatcgacatgtgtcgtggtccacacgtaccaaacatgaagttctgccaacatttcaaaattatgaaagtggcaggtgcatattggcgcggtgattcagaaaataaaatgctgcaacgtatttacggcacagcatgggcggataaaaagcaacttaaagcatatttaaaacgcttagaagaagctgaaaagcgtgaccaccgtcgtattggtaaagcacttgacttatggcactggcaagaagaagcgccaggtatggtgttttggcataacgatggctggagcatttaccgtgagctagaagacttcgttcgtgaaaaattacgtgagtatgattacgaagaagtaaaaggcccattgatgatggaccgtggtttatgggaaaaatcaggccactgggataaatacgcagatgcaatgtttacaactgaatctgaaaagcgtgaatatgcaattaaaccaatgaactgcccaggtcacgttcaaatctttaatcaaggtttaaaatcgtaccgtgatctaccattacgtatggctgagtttggttgttgtcatcgtaatgaaccatcaggcgctttacacggtttaatgcgtgtacgtggctttacccaagatgatgcacatatcttctgtacagaagagcaaatcatggatgaagtatcatcatgtatcaaaatggtttacgatacatacgagacgtttggttttgagaagattgttgtaaaactatcaactcgtccagaaaaacgtatcggtgaagacgcaatgtgggataaagctgagttagcgttagccgatgcattaaaagcgaacaacattgaatttgattacctaccaggtgaaggcgcattctatggccctaaaatcgaattcacgctttatgattgcttagaccgcgcttggcaatgtggtactgtacagctagactttgcattaccaggccgtttaggtgcgacatatgttgcagaaaacaacgaacgtcgtacaccagtgatgattcaccgtgctatattaggctcgattgagcgttttatcggcattctaactgaagaatacgctggattgttcccaacatggcttgcaccaaagcaagttgtgattatgaacatcaccgataaacaagctgattatgtgcaagaaattgtacaaaaattaaataaacttggaattagagccgctgctgacttgagaaatgagaagattggctttaaaatccgtgaacatacgttaaaacgtattccatatttacttgttgttggcgataaagaagttgaacaacaagaagtggcagtacgcactcgcacaggtgaagacctaggcaaatttagtgttgatgatttcattgcaaaagtaagcgaagaaattaaaaatcgacaataaatcatgagcgtgtagggcaaaacaaacagccaactacacgctttttattttatattcttggaggatcgtaccattagaggcggcaagaaagggcaacaaacagctcaaaaaaatcgtatcaacgaagatattacagctaaagaagttcgtttaattggcatcgacggcgagcaagctggcatcgtgtcattaaaagaggcgcaagctatcgctgatgatgcgggtgtagatcttgtagaaatcagtcctaatgctgagccacctgtttgtaaggttatggactacggtaagttcatctttgaaaaaagcaaagaactaaaagaacaaaagaaaaagcaaaagcagatccaggttaaagaaatcaagttccgtccaggtacggatgaaggtgactaccaggttaagcttcgcaacttgcgtaagttcttagaagcgggtgataaagctaaaatcaccatccgtttccgtggtcgtgaaatggctcaccaagaaattggtattgaattattaaaccgtgttaaagccgatttagaagatgtttcacaagttgaatcattccctaatcgtgttgaaggtcgtcaaatggttatgatgatggcccctattgctaaaaagcaataaacaggttatattacgcaccgattttatttcaggtctgcaagtaacagtttactgttcacctgaaataaccggtttaaagtaaggttgcaaagcaatagcaatgaaccttcaccggattatggcagtaagttaggccttataaagtagagctattttatatatctctcgcctgcttgctaatgttttaagcaatacatttggagttattgcaatggcttataagctaaaaactcacagaggcgcggctaagcgtttcaagaaaactgcttcaggcggtttcaagcgtaaacaagcgcatcttcgtcacattctgactaagaaaacttctaagcgtaaattacacttacgtcctaagatgatggttcataagaatgaccatggtctagtttcacgtatgttaccattcgcttaataggagtcttcagaaatggcaagagttaaacgcggtgttatcgcacgtgcacgtcacaaaaaagttttaaaacaagctaaaggttactacggagcacgttcacgtgtttaccgcgtagctttccaggcagttactaaagcgggtcaatacgcttaccgtgaccgtcgtgctaagaaacgtactttccgtcaactttggattgcacgtatcaatgcagcagctcgtcaaaacggtctttcatacagccgttttatcaatggtcttaaaaagacatctgtagaaatcgatcgtaagatccttgcagatatcgctgtttacgaccaagttgcattcgcagcgcttgttgcaaaagcaaaagaaggcctagcggcttaatttcgcttttaatacagtttaaaaaggagcttagtgctcctttttttgatcctgaaaatcactcattacttcattatagatgctagctagcatgtcatttgctccatttttttgttgaatcaccgcagtttacgcaatccataataattagttggtataatttcaggtattagaataagttctgcacttgagagtgatatgtttgcgagtttagtgtttttatctgctgtagtaacgttagacagccacttacccccattaatgtcatggcacggaaacagtgtgtcattactacaagaaaaagggccattaacgacagagttcgagttaagtgatggtactttgtctcctaattatgatgagacaatggcatttgttgaccgtttagttgctgctaacccaactcaatttaaattaaagactatcgctactagtagtgcaggtcgtgcagtgaaaatgttagtcgcaaatgagcaggggttatttgatgcagagcagctagttgcagacactaaacctacgatttttattcaagcgggcattcatagtggcgagattgacggcaaagatgccatgtttatgctgctacgcgatattgccacgggtaaacgtcgcgatatcttgagcaaagttaatattctgtttataccgattttaaacgtagacggtcacgagcgtagtagtcaatataaccgtattaatcagcgtggcccagtagaaatgggttttagaacaaacggtctaaatttaaacttgaatcgtgattacacaaagcttgataccccagaagttcgtggtgtgatgaaggtgatcaatcagtttaagccagatttatacgttgatgttcatgtaaccgatggtgctgattatcaatacgatgtcacgtatggctataaccctgtattttcaagtgaatcaccaagtgtatctgaggcattagataatctgtttaagcctgtaatagatgcgaagcttgaaaaggcagggcacataccaggacctcttgtgtttgtgatggataagcgcgaatttaagaaagggctagctggctgggttgccacaccacgcttttcaaacggctggggtgacttgcgttcattacctactattttagttgagaaccattcattaaagccctataagcagcgtgtgttaggtacttatgttttcattgatggtgcaattgatgccttagctgcaaacgataaagcactaaatgaggcggttagaaaagagcttgatttcaaaccaacgcaattagttgttgaacgtggatatgcaaaacaaccagatactattgaatttaaagggattgcgtacagtcgttctgaaagtgctctttctggtcaatctgaggtcaagtatttaggtcagcctaaagactatgacgcgttacctattttttggcaaaaagaggttaaaaagactgttaatgtgccaagcgcgttttacattccacctgcgtacagtcacattattgaaaagttaaagttgcatggtattaaggttgataaagttactgaaaacgtatctgtaccgttaactcaagcaattgtgaaagattacagctttgccaaagcgccttttgagggacgttttagggttgatgccagctttgattataccaaagtagacagcctaaatatgttaggttggaataaagtatcgactgagcaaccatactctgaacttgctactcacttactgcacccagaagcgccagattcattctttgcttggggagacttcaatactatttttcagcggactgagtatgttgaaaattatgcattgatgccttacgcaagacagatgcttaaagaaaagcctgccttggcgttggagtttgaccaaaaaatacgtgaggacaagcagtttgcaaatgacccacaagcgcgcctagattggctttatgagcgtacgccattttatgatcaagcttatttaaaatacccaattcttatgagctttgagcaatctgaacaaggacagtaatatgaaagtagtgacagttccggtgactggttttgcacaaaattgtcgtattataatttgcaccgagagtaatcaagctgcattaattgatcccggcggtgataaagaaaaacttatcactgagctgacgaaattaaaatgtaaagtggttgcggtatatcttactcatgggcatttagatcatgttggcgccgctaaagaactagctgagcattatgatgttgaaattatcggcccgcatattgatgatcaattttggtttgatgcacttcctatgcaagcacaaatgttcggttttaatgctatcgaaccattttatcctacaaagtggttatgccacggcgatacgatagaggtgggtcaactatcgctttctgttcgccactgcccaggacatacaccaggccatgttgtgttttaccatgaacagtcacagcaggtagttgtcggcgacgtaatctttcaaggttcaattggacgtactgacttccctaagggtaatagcagtcagttaattgaatctattcagtcacaaatacttacgctgactgatgatgttgttatcttagcggggcatggtccaaacactacggtaggccatgagcgaaaaacaaacccttttataagtggtaagtatggctaaaattgcaatttcattgcataagtagtagaaaataagcagactgttttttaaatcagttatataatttaacccataatcttaaagaaaaagaaataaaatgtctcttaaccaagtagatcgccaaattttggcattattacagcaagatgctagcttatcaacggcagagattgccgataaagttggtttgtctcaatcgccatgttggcgtcgtattgctaagcttgagcaagatggctacatcaaaggtaaagttgctttgcttgatgagaaaaagcttggctttgatatgttagtctatgcccatgttcgtttatcaaatcacggcagaacaaacttagctgagtttgaacgattaataatgagctacgacgaagtcactgagtgttacagtatggctggtacaatggacttcatgcttcgtattatctctaaaggtattgaaggctatgagcaatttgttcgcgataacctgttaaacctagagtttgtacaagaagttcattctaatgtcactatgacgtgtgttaaacgtagtacgtctttaccactttagtttttatttactacgattgataacagttaaaaacggttagtacttcacagtactgaccgttttgttgttaataattgttaacttttctgctttttgctagaattgcgcgccttgccgaaacgtattcactacaaagaggaacttaatgtttaacttactcagcaaagcgccaagctctgctaaaaatgatattttatctggcttgacggtcgcactggcattggtgcctgaagctgtagcattcgcttttgttgctaatgtagaacctttagtcggtttgtatgctgcctttattgttggtttgatcaccgctatttttggtggccgtccaggtatgatttctggtgctaccggcgcattagccgttgtaatggtaagtttagtattagatcacggagttgaatatttatttgcgaccgtgcttttaatgggcattctgcaggtcttagcgggtgtctttaaacttggtaaatttattcgcatggttccgcatcctgttatgctcggctttgttaatggtctagctatcgttattttcttagctcaacttggtcagttcaaagtacctgatggcatgggagggcagcagtggatggaaggtcaagccttgtatattatgcttggcttagtggcacttacaatggcaattatccattttttacctaaactgactacggctgtgccttcttcattagttgcaattgtcacagttacaggattggtaattggttttgacttagaagcgcgtaccgttcttgatttcttaaaaggtatgacgggtaatgagcaagcaactattgcgggtggtttaccacaattccacatccctatggtgccatttaacctagaaacattaaaaattattttcccttatgcgcttgttcttgcggcaattggtttaatcgagtcattactaacattaaccttaattgacgaaataacagaaacacgtggtcacagtaacaaagagtgtatcggtcaaggtgctgcgaatattacctgcggtttctttggagcgatgggcggttgtgcgatgatcggtcagtcaatgattaatatcaactctggtggtcgttcacgtttatctggtatcagtgctgcattattgctgctagcgtttattattttcgctgcaagtctaattgaaatgatcccactggctgcacttgtcggtgttatgtttatggttgttcttggtacgtttgaatgggcaagctttaagatgatgaagcgtgtgcctaagtctgatgcctttgtgattgttcttgtatcgggtgtaacggtagttactgaccttgctattgcggtatgtgttggtgttattgtatcggcactggtatttgcttggcagcatgcaaaacatatttacacaaacaattatattgatgagcaaggctcaaaagtatacgaacttcatggtccattattctttggttcagtgaaaaacttcgctgagttatttgatgttaaaaatgaccctgaagatgtgatcatcgaatttaagcatagccgagtagcagatcacagtgcgattgaggcaattgataacttagcagataaatatgctaaaacgggcaagaaattgcacttacgccacttgagtcctgattgtatccaacttctacataatgcgcgtgatttagttgaagtaaacgtgatcgaggatccgcattataaggtagcttctgataagttagcttaaatagacaatgtttaaaaagcgaaggcggctgtcgtcttcgctttttttatacctgaattatgcgttaaggctataaaaaattaagataggcggcagtgctttgtataacagtctatcggtataataactataagtttgtaaggtaacttgatattttgaattggcaatcattagttgataatcgacaacgttttttctgggttttgcaaattgcaggctggatagggtatgcgttagttaattacatcggctctaaagtatttgaaatgcgtgatatttacgtgtttgttattgtattaaatgcttatgctggttgtttaatgacagtgcctttacgctacatgtatcgcaaagtgtggaatgcttcgccttgggtactcatgttagtagtatttggtgcctcttatttaacgggcacactttgggctgtagtacaaaaatttaatttatgggagatatatcgccatggttatcgcccaaatgagtggttttattactttcagcaaggtttagattcagtctatattatcctttgttggagtggattatattttggtattaagtattaccagttattgcaaagtgaacgtcaaaaggctttaaaagcgacaacaatggctcacgaagcacaacttaagatgctacgctatcagcttaatccgcactttttatttaatacgcttaatgcaatctctacacttattttggttaaagagaataaagatgctaatttaatggtgtctaaattaagtgatttcttgcgttatacactcaatacagatccaattaaaaaagttccattagagcaagaaattcatgcattaatgctgtacttagaaattgagaaagtacgctttgatgagcgtttacaaattaacgttgatgtaagcgaacaagcaaaaaaagccttagtaccaagtttaattctccagccgttgatagaaaacgccattaagtatgcgatagcacaactcaacgagggcggggtcattgatattaaggcacaagtttttgcaaatgaattattattggaagtaggcgataatggtcctggcactgagcttaaaaatggtcagcttgttaattctcaaggggttggtatagctaacactcaggatcgattaaaaacactttatgagaacaactactcgtttgttctctctgacaatacgccaagtggattaaaagtaaatctgcgcgttccgtttgaaaaggctgttaagaaatgagcaaaattagaactttgatcgttgatgatgaaccgcttgcaaggaaaggcttagccgttcgactttctgaatttgaagacatagaagtaattcgtttatgtagcaatggtcaagaagcaatagatgagtgcttatcagggaatatagaactggtattcttagatattcaaatgccaaatatgaatggttttgaagtggcccgcgctttaagcgaaagtgttaatccattgcctgctattgtgtttgtaactgcgtttgatcagtttgcggtaaaagcattcgagattcatgcattggattatattcttaaaccagtcgatgacaacagactaaaacaggcggtagaaaaagtgcatacttatttaaaaacacaacaagataacgcccataagaagaaactagcaagctttgtggctggtattactggcaacaattgtgaagagattttgaaaaagcttgcgacaggcgatagccttgcagatcgtcgttatcctgaatcactggcagtaaaagagcagggcgaaattgttcgtgttcctgttgttacaattcaatgggttgatgctgcaggtgactatatgtgtttacattgccaagatggccaaactcatatcttacgtaaaaccatgaaagagctagagcaagagttagatccgcaactgtttgttcgtgttcaccgcagtgctattgttaacaccaaacaaattagtaagctcgttactcaggtgagtggggagtacttgttagttctcgataatgggcaagagttaaaagtgagccgcagctatcgtgacaaagtaaaagctgcactagcaagttaataagctttcataatcagttaaagacaaaaaaggcgcaatcaatgcgccttttttaatcagtgattgcaacagtttaaactgtcacaatcttcattgtattggtagcaccaatagtttccatcgcatcaccgtgcgttaaaatcacagtatctccggtgcttaaagaaccaagttctactaatgtattgagtgcttcgcgaaccatattttcatcttcacacttagttgaatcaaaaaacacagggtaaacaccgcgatacaatgcagtttgacctaaagtgctagcgtgacgtgataatgagtaaattggtaagccagaactaatgcgagacattaacttagctgtgctacctgattcagtcagtgtcacaatcgcttttacagaatcaagatggttggctgcatacatagcagacagtgcaattgactctgcattagatgaaaagcggctgtctaaacggtgcttagaaacgtgagtttctttttgagactcagcacctaaacatacgcgggccatagtagcaacggtttcttcagggtagtcaccagctgctgtttcagcagataacattactgcatcagtgccatctagaaccgcatttgcaacgtccataacctcagcgcgtgttggcatggggttatcaatcattgattccatcatttgcgttgctgttaccacagtacggtttagtgaacgtgcgcggctaataattagcttttgtttaccaacaagggcagcatcaccaatctcaacaccaagatcgccacgagcaaccataacagcatcagaagcaagtacgatatcatcaactgcttcaactgtttctacagcttctgcacgttcaattttggcaagaagctgcgcgttagaaccagcagcttctgctaatgagcgaacatagcgcatgtcatcaccactacgtgggaatgatacagcaatataatcaacaccaatctctgttgctgtgattaaatcttctttgtctttatctgtaaatgccggagcggtaagaccaccacctaagcggttgatacctttattgttagaaagtacaccacccacagttactgtggtgtgaactaaatgaccatctacactatcaacagtcagttggataaggccgtcatttaataacagtaagtcacctgatttaacatcgtttggtaactctttataatcgatacctacagcatttacatcgccttggcctttttccatttttgcatctaaggtaaatttagcgccaactgctaagtttactttaccgtctttaaacgtagatacgcggatttttggaccttgtaaatcagcaagaattgcaatgtgcttgcctaaacgctttgcaatatcgcgaactgcttgtgcgcggtctttgtgatcttgtgctacgccgtgtgagaagttcaaacgaaccacatttgcacctgcacgaatgattttttctaagttgttatcgcgatcggttgccggcccaagtgtcgcaacaattttagtgcgtcttagcatcaaattctcctgtgcgcttaaaaatattaagcgaattgatggttatctattaaaatgttgtgcttatttaatagcatataaatgaatcaaattaagcttagtgcagaattcataagtaaaaaatcattgtttttacgtatgagtatctggctctttgtattaaatacagagtttacaaagcattaatgacgctattatgacaccggtgtcaggtagcgtcaatacacatacctttttaaagggtattataaaaatctggtccgatgcccttattaatttgatatactaaccccagcttgctgcgtgccttttatagatttatagcaagttagctcggaaactcgcatttttgggctgcttgggtataatgcgcgcgtatttattttgattaactaaccaatagttgttaccgaggaggacactaaatgcaagttgcattagtagggttaggcgttatgggtaaaaatcttgccctcaacctgattgaaaaagggctgacattagtagcttatgataaaaacccagatgcgggtgccgagttactaagctgtgcgaaagcactaggtttggcagaccgtttacatattgtgtctgatttaaatgatatggttagacgcttagagccgcctcgttcgattctacttttagttcctgctggtgaattggttgataaagtatgtacagagcttgcagaagcaggcgttgactgtgatgacattatcgtagattgcggcaatagtaactataaagacggcataagccgtaaacttaaatatcaaaacaaatttgaatttgccactatgggtatttctggcggtgccgaaggtgctcgtcacggccctgctatgatggcaagtggttcagagggcggctgggagcgtgttgagccgtggtttgaaaaagtagctgcaagctataaaggtgagtcatgctttgcccgtgttggccaatctgcaagtggtcactttgtgaaaatggttcataacggtatcgaatatgcgttaatgcaattaattgcagaaatgtatcaattattgcgtttaggcacgaatcgttcaccaaaagaagttgctgacatttttaatgaatggtctgaaggcacattaaatagctacttactgtcaatctcaagccatatcttgagcctcgaaacaacagaaggtgaaccgctagttgatttaatcgacaacaaggttggcgctaaaggcactggtttatggactgcgcaaaatgcgctagagcttggtattgcagtaccatcattagtggcagctgttcaagcacgtcacttaacaaatacctgtgatacgcatgctgctaaagaaatgacttacgctgctaaagcaactgacacagttgatttagacttagcggagctaaaagatgcattcactctggcaagtttacttgcttatcgtcaaggtttagcacttatcaaaggtgcatcacgcgctcatcagtggaaagttgatctttctaaaacgctacaaacatggcgcgcaggttgtattatccgtgctgattacttagacaacgttgctgaaggtgtagaatttattgattctatgcagcgtgagtcagcggctttacgtaaagtgactggtgcagcggttgcttctggtcttgctttccctgtattaacagctacacaaacttacattgcgacgttaacaacaccaagcaatggtcaccttgtgcaagcacaacgagattactttggtgaacatggtattaaaacccacagcggtgaaatatgccatttaactgacttagttgagattgacgaaaaagttcgttaattatcaaaaaacgaaaaaaggcaccaattggtgcctttttttaacggcttaactcgccgcgaaggttatcttgcatcaagtgtcgaattgtttctacttcaagcttttgactaaataagtagtgcaacttggtcaaacaggcttctaatgtcatatcatagccgctaataacaccgcaattaagcaaagcattccctgtggcatagccgcccatattcacttggccttttaaacattgcgttaaattaacaatcaccataccgcgcttacttgcatcattcagaatatctataaatgcagagtcttgtggcgcattacccacaccaaaactcaagagcaccaaggcctttatattgtcgtttactaaactttttaccacttcagggctgatacccggatataagtaaagtacgccaataggctgtggagtaatattggaaacttgcagtgcattatcaacgtaaggacttaactggcctttgataagttgaatattaattcctgacaatgctaaaggttcaagattcggagaggcaaatgcatcaaaaccatcagcatgggcttttgttgcacggttaccgcggaataattggttattaaagaataggcttacttcagcaatagggtaattagctgctaaatacattgcattgagtaagttgacttggccatcagaacgaagctgcgaaagcggaatttgcgagcctgtgacaattacaggttttgtcaggttctcaaacataaatgacagggcagaagcggtataagccatagtatctgtaccgtgcagaaccacaaagccatcatagtcttggtatttacttttgatatcgtcagcgattagttgccagtgggcaggtgacatatctgaagaatcaatcagtggacaatattcgtgaatatcaaacaaaggcatttcgtcacgattaaattctgcattattgaccacagtttcggttaaaaaaccttcagccggtacatagcctcggctcgattttttcatcccgatggtaccacctgtgtaggcgatatatatacgtttacgtttcataaaaaaggcccagttaaataactgggcctagtatacctaaaattgaattgctaagtaacttattgaattacattacacaccaaacaacgagcgtatacgccttgtggatcgttgtaatctttaagattgtcaatttcactacttagttgcttgatcaggctctgtaaattagcttgtgtagccaatactgattgtgatgaatcagacttagcaaagaagcttttaactgctgctgtaccaaagatatcttgaagcatttgctcttgcggtgtaagcgattgtttgatggttttaacatcataatgcttaagtttagctagttcagcggcagcttcaattgcatcttgcttgtcacccagtttatcaactaaaccaagctcttttgcttgtgttgcaatccatacacgaccttgagcaattttatctacttgttcaggtgtcatattgcgcgcttcagccacaacatctaaaaagcgtttatatgcattttcaacacttagttggataatatctgccattttctcatcaagcggtcgcgcaattgagaagcctgcaagatctgttgtcgcaacaccatctgaataaatacccagttcagccatagtattttcaaatgtcatgaacgtaccaaacacaccaattgaacctgtgattgtgctaggtgcagcccaaatctcattggcggcagaggcaatccagtaaccacccgatgctgctaccgagctcatagaagcaataaccggtttaccagcagccttcagagctaaaacttcagctcgaataacttcagatgcgaacatactgccgccgcctgaatctatacgtaataccacagcttttactttgtcatctaaacgagctttacgaagtagggcagctgtagaatcaccgccaatttcaccggctttgcgttcgccatcgacaatagtgcctttagcaacaacaaccgctactttttcagtgattgggttgtcaaattcaacaggtggttttaccaatgatagatactcacggaaactgacttgcttaaaggtcttaccggtttcttctgcaccgactaattcaatcagttgctggcgaatttgctgtgatgtttttaaagaatcaacccattgattgttcaaagcgtactgacccgagttaccgtcaacggcctgcattttagctaagtacacatccatatcttcatcaaaattgctttcatcgaatgggcggcttgcagcaacatctgttttatattcattccaaagtgctgttaaccaaacgctgttcgcttctttagctgcatcagacatgtcgttgcgaataaatggctcgactgctgatttataagtaccaacacggaaaatatgctgtgttacttttagcttttctaatgcttctttaaagtaaagagggaacatgccatagccttcgatactcacaccaccatatggatgcattgagatttcgtcagcatgggctgcaatataatattgtgcttgagtgtaataatagcctgtagcaatgacttgtttaccagccgctttaaactcatcgatagctttagtaatttgcttaagcttattgatgtgtgcactaggcattttttgtaggtcaagtagcattacagtgatgcgatcatcattggttgcttcgttgataacttcgattacatcatcaagtaaaatttctgatggtgcttctttgcccatagttgcgtcattaatcgcagcttctacaggatcaacgtaagttttttcttcaactattgggccatttaagttgaggcgcaacacagttccgtctgctacttttactttgtcttcttcacctgttattgcaacgaaaaagagtattactagtaataaaaataaaatgtttaggactaaacggcgggagaagttaatcccagtccaaatgcctttaaatatctttgctagcaaaataaatccttaattcaatacagctttgtaatgactcatcttagcttagattaactttaaatttaactgttaaatagtaacagagtgtttaaaaagacaatttgctacagaatatttactagcgaaaagttgattattctaagttattaccgcagaatctatttcaagtagaggttcgaccagttaacggggcacacaatgttagaacaaaaattacaattacagcataccgaacttcgtaaccgtttggttatgggatcaatgcataccggcttagaagagggatggcacaaccgtaaacgcttgcgcgcattttatgaagcacgtgcaaagggtggcactggattaattataactggtggttacagtccaaatttacgaggtaagctatcgcctttcgcctcaacgtttaactcgttttatgatgttattaaacatcgcgcatatacggatgcagtccatcaacatggcggaaaaatttgcttacaattattacatgctggccgttatgcatatcatccatttaatcaagcaccaagtgctattcaagcacctataaatccttataaacctaaagaaatgtcgttaggctcaattaaaaagactattaaagactttgcaaactcagcaaaactagctgaaaaagcaggttacgatggtgttgaaataatgggatctgaaggctatttgattaatgagttcatggctaaccatactaataaacgtacggatagttatggaggtagccttgaaaatcgtatgcgtttagctattgatattgtaaaagctgttcgcgctaaagtaagtgaaaaatttattattgtatttcgcctatctgtaatggatctgatcccaaacggctcgacacctgaagaagtaaaacagcaagcgcttgcacttgaaaaagcgggtgttgacatctttaacacggggattggttggcacgaagcacgtgttccaacaatagcgagcatggtaccaccgggtgcctttaaagaagcatcaaaacgtttaaaagatacagtatcggtaccggtaatcgcagtaaaccgcattaatacacctgaaatagccaatggtattttagaagcgggtgagtctgatctaatttcgatggcacgtcctttattagctgatcctgagttttttaataaatacgtaaataacaagtcagagcaaatcaatatctgtattggctgtaatcagggttgtttagaccatgtatttaaaaacaaacgtgcgacttgcttagttaacccacaggcggcttttgaattagactatagccttgaaaaagcgtcatcttctcgtttagtacttgttgttggtgcaggccccgctggtctggctgctagttgctatttagcagaaaaaggtcataaagtgactcttattgagcgtaaagagcagatgggcggtcaatttaatttagcaatgcaagtacctggtaaggaagactttaaccatactcttaattactttactaatgagttaaaacgcttaaatgttgatttaaagctaggcactgaatttacagaaaacatgcttaaccaatatgatgatgttgtgtttgcaacaggtgttagacctcgtgaagcaaaaattgaatgtaacgatggcaagcgtgtgtttgcctatgatgaagtgatccgcggtgaggtagagctaggtaacaaaatagcgattctaggtgccggcggtattggttttgatatggttgcctttttaagtgaacacaaagggcaaactattgagcaattcaaaactcaatggggtattgaatgtgaagctgcacctgaaaaagataaccgccaaatatacatgcttaagcgaagtgcagggcgttttggtagtgaactgggtaaaacaacgggttggatccatcgtcaagttgctaaacagcatggtgtaaaacaaattgctgagtgtcagtaccttagctttgacaaccaaggtttgaaaattactgttaaaggtgaagagcaaatcttagatgttgatactgtgattgcttgtattggtcaggtttcaaatacagaaacattcgaaaaacaaacagaaaacgccaaagttcacgttattggtggagccaaactagctgctgctattgatgcgaaacgtgcgatttttgaagcgctacaagtcgctcgtaaaatttaattgaaagtaaactagaaaacccgcggtctgtgtgattaatctaattagtcacgagaccgcaatgttgatcacacacttattacctctttaccaacgcatcttaactaaacttcagtttttagatggactacccagcctatttattcgcttaatcttagccccagtgatgatcattgccggctttaataaacttgccttaagcggtgatgttacccatttttatcaatactttttagcctctgatgatatcgtcgcttggtttggcaatagtgaatggggcttaggcctaccaatgccctctgtactggcctttttagcagcatggacagagtttttaggcggaattttgctgttatttggtctgttcacacgtttagtagcaatccccttaatgataactatgcttgttgctgcaacgactgtgcacgcaagtaatggctggtttgccgttaccccaacagatgctagtaccagccctgcaagagtcctcagttggcttgcaattcctgcaagtgaagccagtttgattaattcaaaagaagcgggtgagagattaactaaaatgcgcgagttattagagactcatggttatacggaatacctgtatgctaaagggaaacctgtgattttaaataatggtattgagttttcagcgctctatttcgtgatgctactgagcttatttttttcggggggaggtcgctattttagcctcgattattggcttgttagaaatcgcactaagctctttattgcaagtgaatataaatgataagctagaactttaatgcctttataaaatgaggcgctgtattaatgttttaataggaattaaatggacgctttaactcttttacaaactcgacaatcagatccacgtcttattgctccgggtccatcagaagaacagcttgagattattcaaagagctgcaataaaagtaccggatcatggttgccttgctccttggcgttttattgttgttgaaggcgatgctcggcatagattaggtgatatttatcatcaagctgcagttgctgaacatcaagatgagcgcacggttaatcgtgcaaaagaactaccacttcgcgcgcctatgattatcattgccattgctgatgtaaaagaaaaccctaaagtgccacgtattgaacaagttcaaagtgctggttgtgcagtgcttgccatgcagcaggccgcttttgcccaaggattaggtgggatctggcgcacaggctattttgctcaaagtgaatcagtcaaaaaagctttaaattgtaaaattgatgacgagatagttggcttcttatatttaggtactcctgaagttgatattaaaaagcctattaggcataaaccagatactttttttgagagactttaaaaattaggaacttttttatatttatgcagtcagatgctattaagcttgcatgtgttagtttaattaatttaagctgcagtgtaagaattattaggatgcaaaaaacaaaataattattcttcagtgtgttttttaatcggttgttttttgttaacgtagggatagtcttaaaaaataacgataaagaagacgaggacaatgggaaacttatttttacgagaaaaagaaaattggttcgcttggtcaatatggggcattataggtgctgccgtcactttctttgtggctatctcaactagagcgccacaatttcttggcttatctgctattgggtttttgttgttacttacgtggtggatgcacagtactaagcggtttgattttggtcgcgcttttaaagtttgttgttatgtattgaccttaacctgcttacccgcatttttattagtgatagtaccaaataacaatctaaacaaaatagacgttattgttcagggggcagggttcgctcttatcagtttaattgtctgttttgtctgctcaatgattgcgcgtcgacctaaacagtattactaaatatgagtttttattgtttttttacaattaaggctttacatcgaccacggtaactaatattattcgcgccgtacggagagatggcagagtggtcgaatgcaccggtcttgaaaaccggcaggggtttgtagcccctctagggttcaaatccctatctctccaccattatttaaaaaaaccgcctacagggcggttttttgctatctggagataaataatgtcagcaagcacaccttctacacctataagaatgataaagcatgttttactttggtgtatcttctcttatttttatcatagtggcattaatgtacttgttgctatggctcatgatgcacaaccagattacgggttgttatcctcaattgcgtatggcattggtttcaatgtactcgtaggtcatttaattggtaagtacgataaacattggcctgttattgcggcaatatttatcgctgtagttgggcttgttgtagtgcctttaatattaatggggcaggcgagtttaaaagatacatattttattttggctatggtgataagtttacctgttgcaacattagtcattgagaaaataaagcaacgaattagtttaaacactgagcaaacgcaataaactaagcgatattcgttgtttttttatgttagtatgggcacgtcttttaactaaataaacgtgaatttaaacatgtcagataattttacaacagacgctgaaaaagcaagttacggtattggtttacaaatgggtgagcaattaaaagcaaacccttttgaaggtttaaacttaaactctgtatttgaaggtatgaaagacgcatacactggtaacgatttccaagttgaaatcccagcaattcaagctgcctttgaaaagatcaatgctgaaatccaagctcgccgcgaagaagaagctaaagtacttgctgctgaaggtattgccttcttagaagaaaatgcaaaacgtcctgaagtaacagtaactgagtcaggtcttcaatacgaagtgcttactgaaggcaatggtgagaaaccaactgtagattcaacaattcgtgcgcattaccatggtacacttatcaatggtacggtatttgatagctcttatgagcgtggtcaaccagctgaattcccagtgggtggcgtgatcaaaggttggactgaagcagtacaaatgatgggtactggttcaaaatggcgtttatacgtaccgcatgagcttgcttatggtgagcgtggtgctggtgctgcaatcgcacctttctcaacactaatctttgatgttgagctattagaaatcatctaattgattttaataggtataaaaaaacctgctttaagcaggtttttttatgtctgaaataaacagctaattaactatttgactcagcgtattctttacacttaactttgtcctcacactcaccataaaggtaaagagagtggttagttaatttaatgccattttctgtagcaatctcttcttgacgacgttcgattaaatcatcttcaaattcaacaaccttgccgcatttaaggcaaacgaggtggtcatggtgagtgctacctgataattcaaatactgacttgccgccttcgaagtggtggcgagatacaatacctgcatcatcaaattggttaagtacacggtagacagttgcaagaccaatctcttcgcctttgtctaatagaattttatagacatcttcagcgctgatgtgttgattgtctggagattgtagaatctctaaaattttaatacgcggcaaagttacttttaaccctgctttttttagttccaagttgtgatcagtcattcaatctgtctcaatttatttagttatactaggcatcattaagatgcacacgacacattagcaactgttagaataacgtgcctagttactaagtgcaaagaacaattcgtttgattgctgtttttttagacgaaaacgaactggttgtgcatctttacatcagctagtaaatgcgagtagtacttgttattaatcagcaagttccgctaaacacatctcttcataaacttgagcgcaccagtcttttacacgttgctctgtcagttcaggttgacgatcttcgtcaatccctaagccaacaaaggttttgtcatcaattaatgcttttgatgcttcgaagtcatagccatcagttgaccagtgacctactacaatcgcgccacgctcagtaacgatgtcattgatcatacccattgcatctaaaaagtattcagcatagtcttcttggtcaccacaaccgaaaattgcaaccagtttaccttcgaagtctacttcttctaattcagggaaaaaatcatcccagtcacattgcgcttcaccgtagtaccaagttggaataccgaataacaataaatcgaattcagcaatctcttctttagaactttttgcaatgtcatgaaccgcgactagctttttacctaattctttttgaatcattttagctacgtgttcagtattacctgtgtcgcttccgaaaaaaatacctacgcttgacatggatttaaaaccttctatctatcaatagccaatctttcttgtaaaattgtttcaatcaacgcgctacggctaatattctgcgcatctgccatatcgcttaatgcctgatataactgtgatgaaaccttaaattctacacgctttaaaccacgtgctttatctcgctttatttgattacgtttatttacttttaattgcatgtcgcgaggtaggggatttgttttaggtctacctggacgtttctcgtattcaaataaatcgggtgttgttctatctgtttctgattttgccatatctagcccacacctgcgccttgccaaaagacttgaataagacctttagctataaacccagaacagcctaagaatagcactaaccaaacgatgtatcggccaaattttggtacatcaccttttttaaggacgtcttgaattgccattccaataaaaaagaaaatgccggctaagccaaaatacaaccctaaggtatcaaattcgttaattaactgactgaccatcaacgtataaaccttcaaaataaacggcgcgtattataccacacaaattcataataatttagtgcgcacgatcaaaaacagcgaaatttatctgtcttttatgtggctaaaaaatcgctaattgctttatttacggcaagcggtttttgtgcgtgtaaccaatgaccagcgccatgaattatttttgctttagcattaggaaataacgccataattgcagggcggtgctcagctaagatgtagtctgaatcattacctttgatgaacaaagtatcacataaacaagaatcattttcatcaacttgagctaaaatattttcatattgctgatatataaccgctaaattaaagcgccattggtagtggccttgatcgtttttagcaaagctctttaataaaaactggcgtacaccgacttcatctatgtgttttgcaaggacttcatcagcggctttcctgtcagcaacatttgactcggctacttcattcaggcctgcgaaaatagcactatgacgagggttattagcaacaggagagatatctaacaccactagtttattgattagcgctgggtgattaagggctaattgcatagcaactttaccgcccattgaatgaccaatgatgtgagctttattaatgttcaagtgttcaagtaactcactgacatcttgagccatagcatggtaattcatggtatcgctgtggaatgatttaccatgatttcgtaaatcgatattcgttacgcggtaattttcagctaaggcttttgcgattacattgaggttttctagcgagccaaacaaaccatggatcaacacaacgtctgaaccttgacccatttgttggtagtttaatagcattttcaactcctaattttaatggcagtattttgcctagcgaaataacaaattgcaaaacatagagaattactgcgagcttaggtataatcatcgagaacttttataatgtgacccgtaaagacaggaataacatgaaaaaaattgacatagacgacgagttatatcaatacatagctagcaacacgcaaagtattggtgagagcgcttccactattttacgtcgtttattaaacctttctgatggcaccttagcgcccgttgaaacagcaactagcaaaactgaacaagaatctccagttgttgaacctgaacaagcaatagagcaagaaccagcccctaaacacgatgaacctgaacaagtcgaaattgtcacaacagcgcaacaagtcaaaggtaatgtgtttaatgtgttaaacaaagaagaactggcaatgcaaaaaggtgttgttggtcgtttcttatttatcttggctgcgctttacagaacacacaaagcagattttgcgaacgttctagaaattaaaggccgtgaccgcgtctattttgcaactagtaaagaggcgttgcttgaaagtggcagtagtatgaatccaaaaaatatcactgatacagagtattgggtgatgactaattcaaatacaaccagaaaaaaaatgatgcttcatgaagtggccttaagcctaggctatagtgcggacgaagcagaaaaaattcgtgattacttataataggtaaggaaataatatggcgattcatccagaggcagggaaacctgcgccacaacagagcttagtaaatgttccaaaactaatctctgcttattacttaaatgaacctgatcttgaacaaaacccagagcattgcgttgcttttggtacgtctggtcaccgcggttgttcattcgatgtaaaatttaatgaatcgcatatattagcgatcactcaagcaatttgtgattatcgtaaagaaaataacatttttggacctctgtttcttggcaaagatacgcatgctttaagtgaagctgcttttaattcagcaattgaagtgttggttgcgaatgaagtgcaagttattactcaagagaatgacgactatacgccaaccccagtgatcagccacgcagttgtttgtcataataaagaaaatccaaatgaattggccgatggtatcgttgtaactccgtcacataacccgcccgaagatggtggttttaaatataatccaccgaatggcggtcctgctgatactgacgttactaaatggattgaagatagagcaaatcaattactgcttgaagatttagttgctgtagagttatttccgtttgctaaagcatcacgttctggctttatcaaataccaagatttaattacaccttatgtcgatgacttagcgaacatcgttaatttaaaagctattagcgatgcaaaaatcaaaattggtgtggatccactcggtggctctggtatcaacttttggccagtgattgccgaaaaatataatttagacttaacggtcgtaaataagtctgttgatccaacattctcgttcatgcctttggataaagacggtaaaatccgtatggactgctcatctccttatgcaatgactaatcttattgctctaaaagatgactacgatattggtattggtaacgaccctgattatgaccgtcacggcattgttacacctgatggtctaatgaatccaaatcattttttagcggttgcaattgactacttactaaataaccgtgaatggtcaaaagatgttgcaattggtaaaacgctcgtatctagcggcatgattgataaagtggttgcacgtaataaccgtgaagtaaaagaagtaccagtaggctttaaatggtttgttgaaggcttgagcaaggggacacttgcttttggtggtgaagaaagtgcaggggcgtcattcttgcgcttcgatggtacggtgtggaacaccgacaaagacggttttatcttaggtttactagctgctgagatattagcagtaacgggtaaaacaccttcacagctatataaagaacttgagcaagagtttggtgcacctatctataaacgtattgatgccccagctaatgcacagcaaaaagcgcgtctaaaagcgttatcagcagatgatgtaactgccagtaccttagcgggtgatgctattacacaaaaactaactcatgcacctggcaataatgctgctattggtggtttaaaggttgttaccgaaaatggttggtttgcagctcgtccatcaggcacagaagatatctataaaatttacctagaatcattcaaaggtgaagagcatctagcattactagaaaaagaagcgaaaaaactggttgatacagtaattagctaatttcatttttatcttttaaaacggctgagattctcagccgtttttgtattctactctcacgtatttttaggataggacaatgagctattcaattccttcatatcttgacgaattaaaaagcaatggcgactttttaaccttaacccgtaacaatgaattttcacttgagccttgtgcattcacccttgagaatggcactgatgtgacagttcatgatacgggcatcattgaatttcaaccaaatcagcaaacaaacaaagatattgttctttcaagtgcgatacatggtaacgaaacggcgccaattgaaatttgtgaccaattaattagagcaattattaaagaacaactgccgcttaagcagcgtgtactgtttatttttggtaatccaaagtcgattaatataggtaagcgctttgtagatgaaaacctaaaccgcctgtttaacggtcaccatactgtagaaggtattgcttcaaaccctgagcgagttcgcgctaagcagcttgaggatgttgtttctgatttcttccaaagaggcaaccacaacagtgagcgttttcattatgaccttcatactgcaattcgtggctctaaaaatgaaaagtttgctgtatacccattcttacatggaaaaccgtggaaaaaatcacagctgcaatttttactcagctgtggtgtaaacacagtattaatgatgaaatcagcggcaacaacgtttagttactactcgtcgtttgtacatggtgctgattcatttacggtagagcttggtcaagtaaagccatttggtgaaaatgacatgagccgcttcgagaaaaccaaacaaactttaactgcattaattagtcaaaaaaaggtagattataaagaatttaatgcagatgattttgagttgttttcagtttatagaacaataaaccgtacgtgtgaagactttagcttcccatttgctgatgatgtagaaaacttcaccggtttcgcaaagggtgaattattggcaattgatggtcagaccagatatgaagcggaggtagagggtgaagctattatcttcccaaacgctgatgtagccttaggtcagcgtgctttgcttaccgttatcccaatgcaagttgatagcaactttatttaaaatctctgcattaacacccatctatattaagttaactatatgactataaagagtttattttgttgtatagttaactttccatgcgtttttagccatttctcatctattcgtctatgattagttgaataacaacttacgttaacgtaaagtgacggcagtttaatttaattagattgaatattgcgcaaactttatccttacagcaaatgctgataataaacacaaataagggcagtggcgtaggtttctgacaacgaaagaaggtaggttatgagtaatccaaataacgtatcgctaaacattaatcatgatctgtcatttattgatggtcacgcattaacgatccctacattaagtattcttaatgaggaaggcgacattcatgaaggtgccaccgcacccgatatcgacaaagcaaccgcaatccgtttatacgagacaatgcgttttattcgagcacttgatgaacgtatgcaagcagcacagcgtcaaggtcgtgtaagcttttacatgcaatgtttaggtgaagaagcggctgtaaccgcatcagcagcagcgcttgaccaaaacgatatgatcatggcccaataccgtgaacaagccgctttgcgataccgaggttttacacttgaccaattcatgaaccaaatgttttcaaacgaaaaagatttgggtaaaggtcgccaaatgccaattcactatggctcacgcgaacttaactacatgacaatttcatcaccacttggtacgcaaattccgcaagcaacaggttatgcgtatggtcaaaaagttcgccatattgacccacaaacaggtgagttaaacagcacaattgataacatcaccatttgttattttggtgagggtgcagcctcagaaggtgattttcatgcgggcttgaatatggctgctgttcaccaagcgccagttatcttttttgctcgtaataatggctatgcgatttcaacccctgctgatgagcaatttaaaggggatggtattgcttcacgtggtgtcggttatggtattaaaacaatccgtgttgatggtgctgatgcccttgcagtttatgctgcaactaaaaaagcacgtgaaattgccactaaacatggtgagccagttttaattgaatcaatcgcttatcgtttaggggctcattcaacgagtgacgacccaagcggctaccgcagcaaagacgaagaagctaaacacaaaggctgtccaatcgaacgtttccgtaactggttactaaaacaaggttggttagacgaagcgcaagacgcaaaagataaagaaacaattcgtgaagaaattttagcagcgcttaagcgtgctgaaaaagtagcaaaaccagcattagaagatcttatttctgatgtttatgataagccaatcccatcactgcaaaaacaatacgaacaattaaaagagcacattttgcagcaccctgatgcttatccaacaactgctgggagattaaagtaatggctaaaatgaacatgcttcatgcaattaactctgcccttgatatcaccatggcagagcatccaaatgcatgtatttttggtgaagacgttggttattttggtggtgtattccgtgcaacatcgggcttacaagaaaaatatggtaagcaccgtgtgtttaatacaccgttaactgagcaaggtattttaggttttgctaatggtttagcggcgtttggtgcacctgctttagctgaaattcaatttgctgattatattttccctgcatttgaccaaatcgtgaatgaatcagctaaattccgttaccgcagtggtaatgaatttaatgtaggcaatctaacaattcgtactccatatggcggtggtatcgcaggtggtttatatcactcacaatcaccagaagcctattttgctcatacaccgggtttgaagttagttgtgccacgtaatccttatcaagcaaaaggcttacttcgtgcatcaattaaagatgataaccctgttattttctttgagccaaaacgtttataccgtgcatctacgggcgaagtaccagaagaagattacagcatcgaacttggcaaagctgaagttgtgcaagaaggcactgatgtcactttgcttgcctggggcgcacagatggaaatcgttgaagatgcggctaaaaaagcagctgaacaaggtattagttgtgaagttatcgacttacgtactattttaccttgggatgttgagacaatcgctaaatcagtgactaaaacaggtcgtttagtcgttagccacgaagctccaatcactaatggttttggggctgaaatcgttgcaacaattcaacaagagtgtttcttacaccttgagtcgccaattgctcgcgtgtgtggtttagatacgccatatccattagcacttgaaaaagaatatgtgccggatgcactaaaagtgcttgctgcgattaagcaatcagttgagttttaggagtcagtatgtctaaagattttatcttgccagatatcggcgaaggcatcgtagagtgtgaaattgtagagtggttagttgcagagggcgatgctgtaaaagaagaccagcctatttgtgatgtgatgaccgacaaagcgcttgtgcaaattccagctgtccatgatggtgtgatcagcaagctatattatgccaaaggtgatattgcgaaagtccatgcgccattatttgcaatggatgttgatggcgaagcaccaacacaaagcgaagaagctcaagctcctgcggctactgaagcaccatctgagactggtgagctcttagaagatttcattttgccagatatcggtgaaggtatcgttgagtgtgaaattgttgagtggttagtgagtgaaggcgatgaaatcgttgaagaccaagctgtgtgtgatgtaatgacagacaaagcattggtgcaaattccggctaaatacacaggtaaagtgaaaaagctttattaccaaaaaggtgatattgcagcggttcatagcccattatttcaaatgagcattgcgggccaaagcgcagagcctgatgtaagctctgcggtagttaaagcacaaacaaatgcagtgactaaatctgcagaaaagccagcacctgcatctagcgcgactaaacaacttaacaaaaaagcagttgcttcacctgctgttcgtcgtaaagcccgcgaactagatgttgatttaacgcaagtaccaggctctggtaaaaatggccggatttacaaacaagatatcgaagatttcttaaacgaagcaccaagccaagaaacacaacaacaagctgcgccaaaagcggcagaaccagcggcaactgtaacagcagtgtctggtggtagtcgtgttgagccaattaaaggcattaaagccgcaatggctaaacaaatggttgcctcagtttcgacaattcctcactttacattctgtgatgaaatcgacctgactaaactaattgcaatgcgcagcgagttaaaagagcagtataagcaacagggcgttaagctcactatgatgccgttctttatcaaagcgctgtcattagctattaagcaattcccagtacttaactcacaagttaatgatgattgcagtgagctgacttactttgatgatcataacatcggtatggcggttgattctaagattggtttactcgtgccaaacattaaatcatgtcagtcaaagagcattgtagatgttgcaaatgaggttactcgtttaactgaagcggcacgtgatggtcgtgtttcaccagatgatttgaaaggcggcactattagcatttctaacatcggtgcgattggcggcacaattgcaactccgatcatcaataaacctgaagtagcgattgttgctttaggtaaactgcagcatttacctcgttttgatgcacaaggtaatgtaatttcagctgctattatgcaagtaagttggtctggcgaccaccgcgtgattgatggcggaacgattgcccgcttcaacaatttgtggaagtcatacttagaagatcctgcaaaaatgatgatggcgatgagctaacatttacaagcaataaaaaaccagcctcggctggttttttattatctaaagcaaaaattatattccgtaaaaatacaagccataaccgaataacaatgccggtattgttgaatacacagttgccattaacgctgcttttggtgctaatgcgattgctgggaatagggcgtcgccatcattcgaaattgcatttgctgccatcgcgctaaatggaataataccttgaatatagagtgtcattacgacaatttgcggcccacaaccaggtaataaaccaatggctacagccaccagtggtgctaaatatgcgtagtcggaaaaccatacgctcaaatttataccagccagattaactaaaatttcaaaaagcataaaactggcgacaacccaggccgtaacaaagtgggtgtccattaaaacctttgttagttttgaaggtggagtacaaggagcctcttcactggttacttgtttataactgctgcctttagatgaaagtgcccatacaactacagtgaataacgccataatcgagccaaatagggtgataccttgattaacgctattaccgaatacgctaaggtcggtattggttgcgataacaaaggcaactatcaagcttggtactagggtcaatttccaaacagggcggctaaatttcaaagcgcttggttggcactgcggcggttctgtgtattcgcttgcctcatcaggttgaaatttatcagctttatgaaatgtattaactaactgaccgctaataacgcccacagcaacaccgattaacatcattaataaaccatcaagagggcgagtagctaatagcaaaaaagcagcatcccccatggttgcggttaagactgcaacaacagaaccaaaactagcttgttttttggtaaattgggttaccacaataatggcacccccacagccaggtaaagcacctaagattgaagcaaaactcacttctagaatgcctgatttagcacgtaaatagctaagctgtaactgaggaaggcgatcaataaggtagtaatagattaataaggtggctgcaacaaatactgatacttgaaaaaaagcatcacttaaagcttgaagggtaaattcacgcgttgttggtactactaatgcaacaagcaaaagaaggggtaaaaacaagcgtttattatccgtaatataacacctcacttttttaggaatgaaactcgatgtttgtgataatgagagcatacagtgcaacctaaaaattaatcaggttacactgtaaattagattttaatgaaaatcaatctcatttgcatctattggcgttggaactctgaagtagcattccatttaggccattctttacgctcagagatatcaaaacctacttgatagaataactgaagatcctgaacggcacctgataaatcccattcatcacggtaacgatcacatggctgatggtaacaaccacgaagcactaaactcatacgcttacggtaatttgctgtttcttcatcaagggcttcactaccgccaccggcatacattgctggtacacccatgtttgcaaatgcaaagtgatcagagcgatagtaaccacctgaagacggtttagggtcgccagatactgtacggccttgtgcttttgcagctgtttctagcagactatccatttctgatttgccaataccaacaacactgatatctttaactttacctaataagttcaagctatccatattgatgtttgcaacagtttgagaagctgggatcacagggtttgcagcataatatttagagccaagtaaaccttgctcttcagccgtgacagctaagaatgtcattgagcggctagggtgctctggtaaacttgcaaacgcttctgcaacttcaattaaacctgcagtgccagtcgcattatcgtgggcaccattatagatttggtcgcctttacgggttttatctgtaccaaggtggtcccagtgagcagaataaatgatgtgctcatctggcttttcgctacccggtaaagtcgcgataaagttatacgaaattgactttttaatcgtattgtttacttcaacgctggctgttaggtcgcccatatcaacatggtaagcaccttttgcagcatttgctttcatggtgtcgaaatctaaaccggctttcgagaataactctttagcaacgtctgtggttacccagccttcaacagcaacacgatccatgttgttgttttctctttggaaaccaaactgttcgccgctccaagagttttcaacaacagaccaagggtaagaagctggtgctgtttcgtgaatgataattgcacctgctgcaccttgacggctcgcttcttcgtatttgtatgtccaacgaccatagtaggtcatggcatcaccggtgaataaatcagggtttttagtcgcaaaaccaggatcgtttaccagcatgacaactgttttgccttttacgtccaggccttcgtagtcgttccagttgtattcaggtgcattgacaccataaccaacaaacacaagttctgagtctttaatactttcttttgcacttatgcggctactgcccataaccatgtcttttttgtattggtaatctttgccaccaatagtcagtaccatgtttgaatctgcttcaagtgaaacaagcggtacttcttgtaagaaactatcgccgttacccggctcaaaacctaatgctttgaattgttcagttaaataggcaagggtaagctcttcaccttttgatgatggtgcacggccgccaaactcatctgatgccaacactttaatatgctcagctaattgctctgagttaatgctttgataggctttttctacatcatttgaagtgatacttgttgaagcacagcctgcaatgatagcacttgcaaggagtgtcactggaaaatagcgtttcataatagctctttttttgttttatggtggcattagtatatgaggttctattaatgagaaccagtttttgcggtaaactagtcacaatacatcaagaagttaatatattacgcaatgaaacgatttaccgcacccgagcagtggtctacacaatacttaacaaccggtgcctttgctgatttagcaacactatttaatatagataagctatcagattggccttcatgtcactggtttagtcagtatctgaatgcacaaacatcacaaggcaccgctattagttttgttgaagatgaaaaatttgctgacgaaactcgctattacgaacaaattatctttgaaactgggcaagtaccaacaagacaaaaaaattggcacgacctttttggcggatttatttggtgtttattcccaaaaaccaaagcgctgatcaatcatcaacatatagaagaaattaaactacacggtctaaaagagcgtagcaaacatagaaacgcactgactttatttgatgaatgtggcgtcgtgcttgcaattacagaacaaagttggcaacagctgttacgcgaccaccaatggcaacaggcgtttgttgagaagcgacaacaatgggggcaaagtattaggccatatatgtttggtcacgctaattacgaaatgctcactcagccttatataggcctaacaggtaaggctttgtttgttgttgttcctggtgacatattttgtaaagatttaagcgagcaatatgcgtatctagatcaacgtctttatgagatgataaaaaatgatgattgcttgcgggacaataaaaatttatcgccgctgccattgttaggtgtgccgggttggtggactgacaatgaaaatccagatttttatagtaataccgattactttagaccgaaacgaaggaaacgcacatgattgaagtcgcagggcttaagaaaaagtttaagctaacgaaagatcataaaaaaaataaaacggacaatatagatccccgtgaagataaagagttttttcattctgtaagagacgttagctttcaatgtaataagggcgaagtgttagggttgttaggtccaaatggtgctggcaaaacgaccactttaagaatgatttcaacagctttaaaaccagatgaaggtagtattactatctctgggcacgatattgttaaaaagccattagttggccgtaaatcaattggatttctgtctggcagtactggcttatacggacgtttgacggttaaagaaaacatagaatattttgcccgtttacatggcatgagtaaaaaagcggtcgctgctcgttgtgatgagctattcaccttgcttgatatgcacaactttattgataaacgcgccgaaaacctttcaacgggtatgaaacaaaaagctaatattgctcgcgctgttgttcatcaccctgacgtggttattcttgatgagccaacgactggcttagacattatgactacgcaaactgttattaactttattcgtcgccttaaagagcagggtacaccggttattttctcaactcaccacttagatgaagtagcgttactttgcgatcgggttgcggtaattaatcaaggtattagctgttttgatggcaccttagatgagtttaaacaaacgggtaaaagcgaagagctaaaccaagcgtttatgaatattttaacggagagccgtgatgtttgaagtatttaaaaaggaattaaaagagctgctacgtgaccgtaaaaccttgatattcgtcgttgctcttccggttgctatattcccactgttatttgctgttatggcatttattagctcgcaagcggcacttgaggccgagcaagaagtgcacacctacgcaattattaatggtaactacgcgcaagagtttacagataaggtgttttaccacaaaagctttactttatataaaggcgacgaaacctttaatagcgtagaagacctcactaatgcggtaaaagcaggcaccatcgatatgggtatctatttaccgtcagacgcaaagcaaacactagatgatgccaagcaaagcgaatggcaagttgtatataacgacgctaaggcaataaactttttgtttgaccgtgtaaaagagcttgcaaaagagtatggtgataaactgcgcacgacaaaactgttaagctttggcgtatctgagcagcaacaagctgccattatcgagcccatcaaagttgtaaaggttgataccgcagataaacgtgaaaatctgggtgagaaaataggtgggtttattccttatctacttattcctctggtattgatgggcgcaacgtatccggcgattgatctcggtgctggtgaaaaagagagaggtacactcgaaacccttctacttacaccaatcacacgtacacaacttgtattaggtaagtttgtaactttacttgcttcttcaattgcaacaaccaccattaccgtactcagtatgggggtgtggatatcagtggctattgcatttgtagatttagcagttgttaaaaacgcatttagctctttaacagtattagatttagggctgatttttgtgttgttattgcctatagctgcaatcttctcatcattagcgctggctatttctatttatgcgcgaacctttaaagaagcacaaaactacatggcaccactaagcatgggtgtcatttttccaattatggttgctttaatgccgaatgttgaactgacgagcaaaaccgcttttattcctgttacaaatgtagctttggcaattaaagaaatcattaaaggcacagttgattacacattagtggggttaattttcttagcgacagtcattgtggcaggtgcattactcgcgttttgtgttaaatggtttaataaagaggatgtactgttccgctagtcaaaattctggctaataaaagagcaccgcagcggtgcttttttattgtctgtgtgaaagtaaaagtacgtcttagtggttttgttttttatttgcgatcaatctttattattataattttgacctatactgaaggaagactcgcataataggcaattgattaaatggactatgtacagccgggacgtatttttagtcgccataaaatccccattattaccttgtttgtattagtaatcgcggcaggcttaatcacagtacaatacgaatactcgctgcgtgaacaattatttgaacgtactcaaataaagatgcaaagagaactgactgataaagaagctgctttacgctctgtttttagagaaaatatttctgcactcaactttctagatgcaaccccacctattatggccattatgcgcgccactaatgagcaacaaatagatcctgtacttggaacacctatttcagcatggaaagacaggttagcaaaaattttcagtggttttatgactacagataagaatatagcccaagcaaggtatatttacattgcagataacggtaaagaagttgtaagagtcgataatatagatggtcaagttattcgtgtggcagaggataagctacaacataaaggcaacagagaatacatgaccatcacctcacaattagcgaatggcttagtatatatttcgccaattaattacaaccgagaaaacggccaaattcagcgaccctatgtgtctagttacagggtttctaaactggttcaagatgccaatggaagcccatttgcggtactgatcataaactactttgcagacaatcttttacgaaagcttacagcagatactgataagcagtttaatgtgtacttgcttaatgctaatcagcaatatttgtatcacccagatgaaacataccggtttagttttgagttagggagcgataaatcatggtctaaggatttttctgcaaatcaaaacataaacacagtcgatttttttgatgctttttatttacataagcaactttacttaaaacaaactgtggaatttaaaaacggtataaaaatggcaccattaacgattgcggtgtcagttgatacagatgacttactaaaaaatttagagcaaaagcgaaacaaatttatctttctaatctgtttagcacttatatgcgttatagctgtatttattatctatcagcgcaacattaacagaaagctagaattaaattttttgaaagaaaaaaatagcaagattatcgaaagttcttcagattcaattttcatgattatgcctaatgggatcatttgctatgcaaataaaacagcaaaaactttctttggcattgagcaaaacaaaacagaatttgagcagctatttaattttaacgatgaagattttttaggcgtcaaacatgctataaaatcagataagccttgttcatttgaggctattcatattaatcaaaataaaacgcattatttttctattactctcgcgacgatatatgacgcagcgaatcaacaaactcagttagcagcaattgctaggaatattgatacgctaaaaaacgcgcagcatcagcttgaaaagttaaatgacactttagaagaagaagttaaaaaacgtaccgctgagcttgagtctgcaaccgagcaagctttggcagccagtaaagctaaaagtgaatttgtcgctaatatctcccatgaaattcgcacccctatgaatggggtattggggatgctagaaatgcttgaagagcaacccctaacaaagcaacagttacagtatttacattatgcaaatgcaagtgccaactcgttgatgactttaataaacgatattttagatttttctaagattgaagcaggaaagttagatttagattttcatgagtttgatgtggtggcggtatgtagtgatttaatcacctcaatggcaatgcaggggcataaaaagggcctcgaagtgttactagatacttgtgatgtaaaacatcgaactgtaataggtgatagtcatcgtttaaaacagatattaaataacttattaagcaatgcgtttaaatttacgcacaaaggtcatgtgcttttatcggtggctgaacaacatattgatgaacacactgtacaattgacgtttgcagtaattgatacaggaattggtatatcagagcaaaatcaaagcaagctatttgaagtatttacccaagaagattcaagcacaacacggcattatggtggaagtggacttggattatcgatcagtcggcgcctcgcgcagatgatggggggagatatagttgttacaagtcaaaaagatgcaggcagttgttttacagcgacaatttcagttgaaattgtgcagcaagaaaagccattaaataaaccaatggcattattggctgaaaaaagaattggtttagcagtaagttatgaagttttagcgcagaacattgagaaaaagctgcaaagtatatgttttccgacttataaaagtttacaaaaaataaagtcttttagtagcaatgaacttactagctttgacttaatcattattgatcacaaacatgcagaaattgatagcgttatcagctatgcaaaacataatactgataaatatttaatggttttggggattttatcctccatgtctaaacgacaacaattgccagataatattatcttcattgctaaacccgtgactaaagatgagttagtttaccgattagcattactttataaagattcagatcatcttattgaacgtaaaaaccacgatgaaaaagagcgtatagagttagatttatcaaaccggtcaattttaatcgtggatgacaacttaattaatatagaagtcagtaaagcaatattacgagatagccatatacatattgagtctgctagtgatggactggacgctctcgatgtgttgaaaaataacaaatcagtatttgatttaattttaatggattgtcagatgcccaatctcaatggttatgactgtacaaaagcgatccgtcagggaaaagcaggacagcaataccaagatgttgtcataatagccatgacggcaagcgctatggcaggcgatagagaaaagtgtttaagtgttggtatgaacgactacattaccaagcctataaaacaagccacattacgtaaaaaattagcaatgtggctaaaaaactaggctgcatcttggctattattaagtccgtgattaggtgtcagtttactaatgtctgcagagtgaatcactttttgtgtttcactccagtgtagtaactcaatacgacctgaactgttttcaactaatgcagtgcaactttctatccagtcgccatcattacaatacaaaataccatcaactactttaacggcagggtgatgaatatgcccgcaaatgatgccatcgacagcttgtttttttgcttcatggatggctgctttttcaaatgcatcgatcgcttcacgcgctttatgtactctagcttttatccaagacgctaaagaccaataattaccaccaaataaacggcgaatacgattagtccaacgatttagaaataataacaagtcgtagccagcatcgcctgcaatactgattaatttgttgtatcgggttgctgagtcaaaatcatcaccgtgcaaaagcaaaaaacgtttgttagccttagtggtgtgtatatattgtttgtgtacttcgataccgaacaacgactcattggcataatggcgaaaggtttcgtcatgattaccgggtatataaataactctggtgccttctttcgatttttgttgaataagcgctaacacatcgtagtgacttggatgccagaaaaattgtcgtttcattgaccataagtcaacaatatcaccaaccaaatacagtacgtcgcattcaatggcatttaaaaagtcgagtaagtactgcgcttggcagtctttgtaacctaagtgaacgtcggagatccaaacggcaggatagtgggttttactactgcaagtggtgttattcatggcatttactcatggtgtaataaagtaaatgctaggcagaatcaatgacagtaaaaagacgctttagcgaaacatctatgacaattaataaaacaaaaaaaccgccgaagcggttttttgtttattaatagctagctaattagcctttaattaaagatgcaatttctgcaactgcagtgtctaaatctagcattagcttttcacctgtgcggcggtttttaagttcaaccttgttttcgtctaggttacgctcgccaataacgagtgtgaaaggtacacctagaagttccatatcgttgaacatcacaccagggcgctctttacggtcatcaaacaacacgtctaaacccgcttcttttaatcctttataaaggttttcagcgatatcagggatacggtgagacttatgcatgttcataggtacaatcgctaaatcaaatggtgcgattggctgtggccatttaataccgtattggtcgttgttttgctcaatagccgcagctacgatacgagaaacaccaataccataacaacccatggtcataatttggtttttgccagattcactcagtacgcctgctttcatagcttctgagtacttagtacctagctggaagatatgacctacttcaataccacgtttgatttgcagtgagccttgaccacatgggcttggatcgccttccacgatgttacgaatatcagcaacttcgtagttttctacatcacgatcccagttaataccgctgtagtgttcgccgtctttgtttgcacccgcaacaaagtcagcaagtacatttgcagagcggtcaacaataattggcatcgttaggcctacagggcctaatgaccccggctttgcaccaatagctgcaacgatatcttcttctttcgccatttcaagtggtgagtctacaagagggtgtttttcagcttttaattcgtttaattcatggtcgccacgtaaaacaagcgcaactaaaccacgttgttcgttttcatctggcgcaccatatacgattaatgtcttcacgccgcgatgaggtttaacaccgtaatgttctttcagctcagcgatggtttttgcatcaggcgttgggaacacttttaactctttgcttgctgcaggacgctcttcagtcggtgctaatgcttctgctttttcgatgtttgcagcgtaatcacttgcatcactaaaggcaattgcatcttcaccagattctgcaagtacatggaactcgtgcgatacgctaccaccaatagaacctgtatcagcgataacagggcggtaatcaagaccaagacgctcgaagattttacagtatgctttgtgcattacttgatatgttttttctaaacactcatcacttaagtggaaagagtaagcatctttcatggtgaattcacgagcacgcattacaccaaaacgagggcgaacttcgtcacgtactttggtttgtacttgatataaagtaagtggtaattgcttataagagcttacttctttacgcacaaaatcagtgatcacttcttcgtgagttggaccaagagcaaatgggcggttgtggcggtcattaatacgcagtaattcaggaccaaattgctcccaacgaccagactcttcccaaagatcagcaggttggataattggcattaacatttcgatagcgcctgctttatccatttcttcacgtacaatgttttctacttttttaagtacgcgtaaaccagagggcaaccatgtatacaaacccgacgcaacgcggcggatcatgcctgctcgtagcattaattgatgagaaacaatttctgcatcagacggagtttctttaagtgttgcgagtatatattgactggtacgcatctctattccaagtagtgttaaaattattatcgtttactcaagacgtttgagtagtaacaaggcgctcagtttaccagtggaatcactgacactaaagcgctatatgtaaaaaagctagcatttttcaatgctgatcactgtattgtggttatctttaacatgccaacgaatattaaagtcatataaggtcatgccgtagctttgctctgaatcacgttgctttttgtatgccggacgaggatcttgctttaatacattgcttataaacgcttttaattcaggttgttcagtttgtttttcgataaaggctagggcttcatcgcaaaattcgacactcatatcggtttctggtcgggtatcggcaaagcctgctgtggcatcagtcatcgcatctgagtaaggtaaataaggcttaatatctaaaataggtgtgccatcgagtaaatcgatacctgatagtaataggcttagttgaccatttttatattcgatgccttccagtttaacagcactcatgccaattgcgtttgggcgaaaggttgcgcgtgttgcaaatacacctttacgctcattaccgcctaggcgagggggtctcaccattgctgaatagcctttatctgcggtttcgtgaaatctgaataataaccaaatatggctgaattcatcgaggccgcgaacaaactcttcgcggttaaaatcgctgctgaataccagctttgctttcgcttcaggtaccaaacgaggttggcgcggtatagcaaatttttgtttgtaaggagattgaatgtggccgacggcagttaattggtattcgctcattgtgcattgtcgttaagataatctgccgacattttatatatatacccaaaccatctcaagctgcgagtttcagttggaattaaaagcgatttaggcaaggcattgattgcaagtaatagtggttctattgttaaaatcaataacgcagtataaatcgcttttaaaccaacccattgggcgcttcacaggcacttactctcatcgttgttacttcttaaaagggactgccattcttgcaaagtaacgccttgatattaagcacctgtgaaacgctgaattctgcatcttgaggcggtttgggtataatcgcaaaaaaaggcagtcgagactgccttttaatatttagactgtgcagtctaaattaaaacatgtattggaatgatacagacgctacatccatatctgggtcaatatcatcttctaattcatagcgctcatattccaaacgtacttgcatattcgtagtgaaagcatactcgatacctgcaccataaaatacatcaccaccatcagtgtcggcactaatactgccaagttcacctaagtcttgctcaatttcagcgtcccactctagccagccacctttggcatagacagaaaaactttctgtaatcggcgctgctaatcgtgcagccagtgaaacaccttcaatttcagctttagagtcgatatcgcttacttcatcaaagttttggtatgcaagttcaaggcttaggtatttattaaattgcgtaccaatatatccttttagcatttgtgaatcatcatcgaagtcagtgtcattttcgctgtcttcaaactcaaaagaatattgaccgtaaccgataccggtataaatacgcggagaatccatttcggtaatatctgcatgtgcagcattgttaaaacctagtagtgctaaagaaagtgcagacattgaaattgctttaatcatttaatagctcctttataaaataaaaaacgaatgtttcgcgtcattcactaggagtattgcaatggcaatgccaacgcaaaaacaaagcctaaagtattgtttttaggctttattaagcgtttttatgaccaggttgttgaaactgtaaacaggcgttcagtttggcagtcgtaacaatttcagggtgctctgtagaagttactaggtgcagtttttaaatcagtgttgttttacgctttttgcaaaagggtttctgtttctattgcgatctctttcatttttatcgcatagttttcaattttcttttcttcgtcagtcacagcggtataagaaggtacttcgattgggtaacctgcttcatccatcgcaataaaactaataacacaatgattggtttcaactaggttttgtgtttttgggtcaccgcagcggacttgaataaagatttgcatgctggttttacctgtgtgagcaatacttgctttcacttcgacaatttggccaaccaaaatagggcgctgaaactttacacccgctactgaaacagtaacgcagtaatgaccactccaacctgcagcacaggcgtatcctgcttggtcaatccacttcattaccacaccaccatgaaccttaccgccaaaatttacatcggtaggttcagctaaaaaacgaaaggttacacttgaagacggcatattttactcacttttaatcacgactaatatcagttcacctttaacgtcttaatctgtaaaggtaaacagaccttaagcatagcctaaaaaaggggccgaagcccctgcaatttaggatgaattttaattaaatgagtaacgttagttattacatatttgggtagtttggtccgccagctccctcaggtgttacccaagtaatgttttgacttgggtcttttatgtcacaggttttacagtgcacacagttttgcgaattaatcacaaactgtttttcaccttcgacttcttgtatttcgtatacgccagcagggcagtagcgttgcgctggttcatcaaattgcaccaaattcactgtaattggaatcgagttatcttttatctttaaatggcatggttgcgattcttcatgattggtatttgataaaaacaccgatgaaagtttatcgaagcttagtttgccatctgcttttgggtagtcgattttttcggcctgatcagcagtaactaaggtggcatgatctggcatgttatcttcaaagttaaacggtaagctgccaccaaataggttttggtctagagtgttataagccccccctaagaacttacccaatttgtgcataacagggccaaagttacgcgattgatagagctctttatacgcccagctttgttcaaaggccgttttatattctgctaaatcggtattttcttttccgtcgctaagggctgctacaatcacatcagcagcgaccatgcctgatttcattgcggtatggttacctttgatcttggcaaagtttaatgtgccggcatcacaaccaacaagtaaaccacccgggaagtgcatttttggtaatgagcgcaggccacctttggcaatggctcttgcaccataggctatacgctcaccgccttctaatacacctttaaagacagggtgatgcttcatacgttggaattcatcaaacgggcttaaatgtgggtttgagtagttaaggtcaacaattaagcctacgactacttggttgttgtcgctgtgatacataaacgcaccaccactggtatcgccggttaatggccagcctgtgccatgtacaacggtgccttctttatgtttactcgggtcgatttgccatatttctttgaaccctaaaccgtaatgctgtggtgacgaatctttatcaagggcaaagtgtttgattaactctttacctaaatgacctcggcagccttcagcaaatacggtgtattttgctctaagctccatacccggcatatagccgtctttttcgttgccgtctttatcaaggcccatatcgccagtgataatgccttttactgtctcgtcttcaatgattaaagaatgcgcactaaagcctgggaatatttctacccctaagttttcagcttgttcagctaaaaagcgacatacattacccatagaaacaatgtaattgccctcgttatggaatgttttaggactcgcaaagtggggaatgctggtggctttttcactgttattaaaccagtaaatatcatcttgcgttacttttgtagtaaccggagcgcctaatgactgccaatcgggtagtaattcatcgagtgctttggtttcaaaaacggcaccagataaaatgtgcgcgcccacctcagagcctttttctaccacacagatcattaattcttgttgtttttcttgtgcttgttgagccaatctaatcgcagttgataaacctgctgggcctgcgcctacgatgactacatcaaattccatggtttcgcgttcgaccatataaacctcttctcggtgacggacctgctgtaaagaaccttatttcatacttgcaaatgaaacgttacaggctgtgaatactttaaggttattttaggttgacgtttacgtcaacaggaagtagtctgaattcataaaataaataagttgacgcgaaggtcaactttgagaacacacaattgatggagtcacgatgaaagtcctcgttccaattaaaagagtaattgactacaacgtcaaagcacgcgttaaagccgataaaacggatgttgatctagctaatgtaaaaatggcgatgaacccgttttgtgaaattgcaattgaagaagctattcgtttaaaagaagcagggacggccactgaggttgttgctgtaactattggtaataaatcatctcaagagcaattacgtacggccttagcactcggtgccgataaagctattcatattgaaacagaagaaaagctcgagtctttacatgttgctaaattactgagcaagattgtagaacaagaatcaccggagctagttattttaggtaagcaatcgattgactctgacaacaatcaaaccggtcaaatgcttgctgctttaacaggtcgtggccaagggacctttgcatctaaagtagatgtacaagcgggtacagttaatgtaacgcgtgaagtggacggtggtttacaaacagtcgctctcaaactacctgctatcgtaacgacagatttacgtttaaatgaaccacgttacgcttcattgccaaatattatgaaggcaaaacgtaaaccacttgatgtaattgctgctgatagcttaggtgtagaccttacgcctcgcgtgcagctggttgaagtaaacgagccagaaaaacgcagtggtggcattatcgttgaagatgttgtgacattggtagaaaagttaaaaacagaagcgaaggtgatctaaatgaaaacattagtgatagccgaacacgacaaaggtgttctaaagcctgaaaccaataaaacgattactgctgctgttaaactaggctttgatgtagatttactcattgcaggcgaaaacttatctgcaatgagtgagcaagcagcatctattgcaggtgttagcagcgtcctgattgctgatgatgccgcttacgcacatcagcttgctgaaaacctagcggatctggttttatctttagcagataactattcacacattgtcgcgagcgctacaacaacgggtaaaaactttatgccacgtgttgcagcacttttagatgttgcgcaaatctctgaaatcatcgatgtgattgatgctgatacctttaaacgtcctatttatgcaggtaatgcgattgccacagttaaatctctggatagcaaaaaagtaatcactgttcgtgctagtagctttgatattgcatcagagcaagcaccggtagctgtaacaagcgttacaggtaaaggctctgttggtttgagtgagtttgtatcagaagaacaaactgaatcagaacgcccagagctgactgctgcacctgtggttatatctggtggtcgtggtatgcaaaatggtgaaaactttgcgttattgaatggtattgctgacaaactaggcgcagcaattggtgcttcacgcgctgctgttgatgcgggttttgtgccaaacgatatgcaggttggtcaaaccggtaaaattgttgccccagacttatatattgctgtaggtatcagtggtgcgattcaacacttagcgggtatgaaagactctaaagtgattgttgccatcaacaaagaccctgatgcgccaattttccaagtcgctgactatggtttagttgctgatttatttgatgtgttacctgagcttgaaagcgctctgtaattcataacgattctggttgttaaaagctgttcaccttttaggtgcgcagctttttttatggtaatttataaaaacgagctggaaaggacgttatacataaaccgtttttcaataaaccgatagtttagaagttttcatgcttgcttcatctaacctttcggatattggctaaagggattttacattctaaaattaaactataacttcataatccagaatcacatttcaatgttattttaaggcaagaaccatgttcaaaaaccttttatttttatgttttttattctgtcctttaatagcctttgctggcagcagttttaggttatctgatggagatcttgtacttaaagatatgagcaaaatcgaagttttagataaattaggcactcccttactcaaagacgtgcaaagtttaggtattgatacaggcggtaatataaagcccggtcaaaaggtagaaacttggtcatataaccttaagggctcaattggcggtgagtatttagtatctatcacctttgaaggagatagagttgtcgatattacatctgtacaaaagaaaaactaaaaagccgctcgagagcggctttttatttgctaggcgatactgattaatatgtcgcgctgcctttagtacgagggaaggcgataacgtcacgaacgttgcccatacctgttacataagcaactaaacgctcaaaacctagaccaaaaccagagtgaggtacagtaccgtatttacgtaggtcacggtaccagctgtagtcttctttgtttaagcccatttcttctaagcgcttatctaatacatctagtcgttcttcacgttgagaaccaccgatgatttcaccaatacctggtgcaactacgtccatcgctgccactgttttaccgtcttcgttttgacgcatgtagaacgctttgatatcacgtgggtagtttttgataactactggcgcgttaaagtgttcttcagcaaggtaacgttcgtgctcagattgtaaatccacaccccattcaacagggaactcaaactttttaccacatgcttttaaaatttcgatagcatcagtgtaatcaacttgtgcgaaatctttagtcacgaattcttctaaacgagagatagctgttttctcaacacgttgtgcaaaaaattccatatcatctcgacgctcagttaatactgctttgaaaacatatttaagcatgttttcagcaagtttcgcgatgtcttctaaatctgcgaatgcaacttcaggttcaaccatccaaaactcagctaagtgacgagatgtatttgagttttcagcacggaaagtagggccaaaagtatagatttttgacattgccgatgcgtatgtctcaccattcaactgaccagatacagttaagaatgcttctttaccgaagaaatcttcactgtagtcaatctcacctttatctgtacgcggtaagttttccatatctaaagttgatacacggaacatctcaccagcgccttcacagtcacttgcagtgatgataggtgtgctgatccagtagaaaccttgctcgtggtaaaaacggtgaatcgcttgagctaaacagttacgtacacgtgttaccgcgcccatgatgttagtacgagggcgaaggtgtgcgtgttcacgtaaatactcaatgctgtgacgtttagccgacatagggtaggtgtctggattctcaacccaacctaatacttcaacagagttagcttgaatttcaaaagactgaccttgacccgctgaaggcacaagaatacccgttacagatactgaacaaccagcagttaaacgtgttacttcatcataattattgagtgaattaggtactaccgcttgaataggatcaaaacacgaaccgtcatgaacggctaaaaatgaaattcctgcttttgaatcgcggcgtgtacggatccagccttttactgttacttggctgtcaaccgcaaccttgccttctaatagctctgaaatcgctaaatggctcatcttcactccaatgatataagttgcctaatataataatgctgtgcattgcacttgaatcgactatcttaccttcgtaaatcaaataaaaaaactattcagacatactctttactagtttttcttcaattgaacaaaataacagcgtttttttgcgtaaaattcgtgataatttaatttctcactgcgctaattggttattttgtggcattattaacaattctcaacaggataactgtcctttagtttttattttttattgtattacaggtgctatgaaacaagtttttattcttcgcggcttacccggctcgggtaaatcatattatgcgcaaagcctagctgatgagttagttgctggtaacgaaagtgagtatgtcgtttgcgcaacagatgattatttttataacagcgaaggtgtgtatcaatttgataaatacaagcttcctgagtatcacaacttaaaccttgcgcggtttattaatgctttagcagaagaaatcccattggtaattgttgataacactaatattaaaaagtgggagtttatcgcctacgcgcaagcagctacagcccttggttatcaagtaaaagaagtgattgttggtgaaattaaagataaatcattgcagcatctttatgctaaacgatgtgaacacaatgttcctttacgaaccataagtaaaatggcgtatatgtttgaatggtaaagtatgaataagaaaggaagcattggcttccttttttaatgcttatcaatacgcctgttgatcaatagctgcgaatatagcatcacataacttcgttaggcattgcagatcacttatataaggtggcattaggtaaataagtttaccgaatggacggatccacacaccttgctctataaaaaagcgttgaatttttgctacatcaacattacgttttagctctacaacaccaattgcacctagggtgcggacgtctgctacgtcatcaagttgtttgcatttagcaagctgctcggtgagtacatggttaatatgtgctatttgttcttgccaaggttgttcgagcagtaaatcaatactggcgcaggcagttgcgcatgctaatggattacccataaaagtagggccatgcataagcactccggcttcaccttcactaataccaatagcaactttgctggtggttaaggttgcagaaagtgtcatcatgccacccgttaatgctttaccaatacacaaaatgtctggttctatgtcggcgtgctcaacagcaaacaaggtacctgtgcggccaaagcctgtggcgatttcatcacaaataagtaaaacatcatacttatcgcaaagtatgcgtagatgttttaagtaatcgggatggtaaaaattcatacccccagcattttgcacaatgggttcaattataaatgccgcaacgtgttggtggtgagctgcaaagtagttttctaggttttcagcctctgaagaactaaactcaccgttaaacttagcacttggagcaggaacaaaaacatgctcaggtaaaaaaccagagtacatactgtgcattgaatttacagggtcgcagacactcatggcagcaaaggtgtcaccatgatagcccttaagcggcgtcattagtttttgtttaccactatgtcctttactcagccagtattgaagagccatttttattgctacttcaacactgacagaaccgctgtcggctaagaacactttttcaagtgagggtggcgtcatactaacgagctttttacacagttcaacagcgggctgatgtgttaggccaccgaacataacatggctcattttgtttagttgtgtggctattgcttcatttaaaaccggatggcaataaccatgaatagcactccaccaagatgccattccgtcaattaatacttcacccgtctctaaaaaaatgcggttagcacgagcatgacttaccggataaacaggcaaaggattagtcattgatgtataggggtgccaaatatgttcgcggtcaaaatttagatctatagaatgttttttgttcatatgtaaactttaatagcctcctgttcgttgacaatgttacgtcaactcgtagacttagccaatcataccgtcccattaatttaaaaaaagagactattatggagcacgctgttgtccgtcacgattggacccaccaagaagtaaaagcattattcgaaatgccgttcaatgatttattattcaaagcggccagtgttcatcgtgaaaacttcaacccaaatgaagtacaaatttctactttattatcgattaaaacgggtgcttgcccagaagactgtaaatattgtcctcagtcaggtcattataaaacggatttagagcgtgaacgcctaatggaagttgaaaaagtgctagagcaagcacgtgcagctaaagaaaagggggctacgcgcttttgtatgggggccgcttggtctgatccaaaagatcgcgacatgccttatatcgagaaaatggtaaaagaagtcaaagagttagggcttgaaacctgtatgacccttggcatgcttgataacgaaaaagcccatgcattaaaagacgcgggtcttgattattacaaccataaccttgatacatcccctgagtattaccagcagatcattacaacacgtacttaccaagaccgattaaacacaatagataacgtacgtgatgctggcatgaaagtgtgttctggcggtattgttggtatgggcgagcaggcagctgaccgttttggcttattaatgcaattagctaatttgccgcaacagcctgaaagtgtgccaatcaatatgttggtgaaggtaaaaggcacgccacttgaagatgttgaagacttagatcattttgaatttattcgtaccattgctgtagcacgtattatgatgccaaaaagctatgtccgtttatctgctggtcgaacggcgatgaatgaacaaatgcaatcaatgtgtttctttgctggtgctaattcaattttctacggtgataaattactgactacagaaaaccctgaagcagatgctgacatgatgctgattaaaaaattaggcatgaactcagaaaggcgtgaagattattctgatgaagcggttgcagcatcactttcatcaaaagttgctgataaagcaacatcagaactattttacgaagcgtaatatttaaatgccttttgattttattgccgagcatcttgttgagagaaaagctgatgcgttactgagaaagcgccaacttgtagagcaagcaagcgggcgctatatagaagttgctggtaaaaagtatttaaattttgccagtaatgactacctaggctttgcggatgattttattgaaataaatgcacagcagcagctaggtagccacagttctgcgctagtgaatggttataataaaccacagcaacagcttgaacagcgtttatgcgagttattaggctatgaaagcgccatgttatttaatagcggatttagtgctaatagcagcgtattaaaagcattgtttcaagataaaagcgtggcgcaatcatcggcaatcttcgaagataagcttaatcatgccagcttaattgatggcggccttcattcttgtgctgctatggtgcggtttaatcataacgaccttaagcatttagaatctcggttacaaaaatcaaaggcaaagcataagctcatagtaagcgagggggtattttcgatggatggcgatcaagcccccattgcagcactctgtaaactcgctaaacaatacaatgcctggctgatgattgacgacgctcatggctttggcgtattgggtgagcaaggtttaggaagttgtgaaaccttcaaaccagatttactgatcatcacctttggcaaggcactggcaagtagtggtgcttgcctgcttgcatcaaagcaaatgattgattacatgctgcagtttaatcgtgaatacatttattcaacagcaatgtctcctctgatggctagttgtactcttgaacggctcgaaaagttactaaaagcagataagagacgctctcagcttacagataatattgcctactttagatcgcttgccaaagagcgtaacttagcattaatggaatctaaaacatctatacaacctctggtattaggcgatgcagaacacacgcttgatgttgctaataagcttaaagaaaaaggcgtgtggttaaccgctattcgaccgcccacggtaccttttaataccgcacggcttcggatcaccataagtagcgcacatcttccagacgatataaaacagctggttgattcgctagtggagtgtttatgagtgttcaactgcaagtacctttaagctttcaagacagtaataagctaacaacacaaactaagttctctaaagcggctgcgaattatgcaagccatgccaatgtacaaaaacaagcggctgcgcatttattaaaaatgatggcaaataaacatcagcagggtacttgccttgatttaggggctgggccattagttaatacggcaatgcttaaaacacattttgatactgtattggcaatggacttaagtcactccatgctaagcactgatcaaaactcaagttgtttaaaagtgtgtgctgatatggataacctaccgctacagcaaaactcacttgattgtgtgtttagtaattttgcaatgcaatggtctgctgatatagaagcattaatcaacaaccttttttgtgcattaaaagtaggcggtaaggtttatttaagctgcgtggtagatggatcccttaaagagatcaaacaggctttcgcttgtttagacgagcaaaaccatattaatcagtttcatagtgctagtcacattattgaatatgcaaaattggcggggtttaagctcaattttgcagccgatagatgttatatagatgcctataaatcgcccttagaagcactgcgctcgataaaagcgattggcgctacctcattgcaaactaagaaaaaacgccaagggttattaactaggcaggcacttaatagtgtttgtaaggcatacccactggttgatgggcatgctagagtgagctatcaagttgtccttttagaactagaaaagtagaatttactcaaaaatgaaagaattttttatcacgggtacagacaccgatgccggaaaaacccatatcaccagtttattactaaacttactagcgcaacataaacagcgtgcggttgggtttaaacctattgccgcaggtgcagaagaagcatttgggcagctagtcaatgatgatgcattaaccttaatggaaagctcatcaattggtgttaaatacaacattgttaacccctttacctatgagccacccattgcaccgcatattgcagcagcccaagtaggcgacagactgacatttgacaagctcgatgctgcttatgcgaatgtaaaagcactcaataccgattatattcttacagaaggtgccggcggttggtgtttacctatcaacgaaaccgatttactctgcgattgggttaaatcacaaaaccttgatgttgttctagtagtaggcatgaagcttggttgccttaatcacgcactattgacagctgctcactttaaagcgctcggtgtaaattgtgtaggttggatagcaaatcatgtcgacccaaatatgcgtgaacaagaggccaatttagaaacactaaaatcagcattacctttcccgcttttagcgattagtccgtatacagacggcccccctaaattaaaaatttacaaaaccttacttgaaattttatctatcaacccataataattgagttgttacttttgacatactctgtcacaattggttgcaattagttccttgcaaccaattgcataagccctaaactaagttggtagaacacccagataattttattaactaacgatttttaaccatgtcgttagttaatacaattggtatgtttattctgaggtttttatgaagcgtgtatttttgtttctactgactaacttagcggtaatgctagtgttaggtattgtgttgtctattgtgatgagcgtactgggtattagccatcgcagtctaggcggcattttagttatttcaaccgtatttggttttggtggctcgtttatttcgttatttatgtcgaaatggatggcaaaaaaatcaaccggtgcacatgttattgaacagcctcattctgaaacagagcaatggttagtttctacggtagcagcgcaagcgaaaaaagcaggtatcgcgatgccacaagtggctatttacgatagccctgaaatgaacgcttttgcgaccggcccaagtaagaacaactcgctggtggctgtgagcacaggtttattacacaacatgaaccaagatcaagctgaggcggtattggcacatgaggtgtctcatattgcaaatggtgacatggttacgcttactcttattcaaggtgtagtgaatacctttgttatctttatagcgaaagtattggcaggtattgttgataacttccttaatagtgatgaagaagagggcggtagtagctggacatacttcttgttcgatatgattttccaaatgctatttggtgttctagcaagtatgatagttgcttactatagccgtaaacgcgagttctctgcggatgctggtgcggctaagctagtaggtgcagataaaatgcgaagcgcccttgagcgtttaaaacaaaaccacccatcacaactagaaggttcaatgatggcgtttggtattgcaagcggtaaaggtgttgctgagttattttcatcgcacccaccacttgatgagcgtattaacgcattacgttaattttaaactcgaaaaagccagctcgatgctggctttttttattgttggtttttctctcgctcgagctgttgcggtaataatacctcaacaatttcacgggctggtaaggtataccttacgccatcgaacatcacagaagtatgctcatcaatgctggtgatccctgttaaagtccagccttcgccgcgctctttacaatacactgtagtggtaggttgaattactttaaactcttcactcatcgaacttaatctaattgcttgtatttgcccttatagtaagacaataatgtcagctcataaagaaaaagaaataattaccgtgtcaagccacaatgacttagcctttgacttacgcccaattcgacacaaagattgccaagcaatttgggatattttaaaagatcctcatgttcaatcttttaatgattacagcgctgacataaccaaaggtgacgtttacgactttattcaaggcgacattgagagtttttataatcaacaaggtattcgtttagttattgttttgcgaagtactggccaagttattggtagtattggcatatttaacataattaacgggcagggtattttaggatttgaattgtcgtcgcaatactttggcaaggggataatgcaaaaggtattagccatgttatttgaaaaattaacaacctttgtgccggccccgctaaacactattgtagctttagttaacccaaataatagttcatgtattaagcttttaacaaaatgcggctttcaacagcatgacgctcgctggataaaatatgttacctaattactataatagtacaatcttgttctgctagagttgctactataaaatagcgcctcatttttaaaaaggagcgcttgcaactatggcaaaagccaaaccaattaccagtattgaaagttacggcatttacagtcattgggatgcaaaagagaaagaccttcctcaaatcaccgaatttacaacagacgttcctgcacagttagatattgaatttggctttattgttaacattaaaaaggccaaaggacaaaaaattaagttttgcgtttaccacccagatatccccgatgaggatggcgatattatgccgccgtttgagggtgaacagtacgttaaaacaaacgattggcagttttacttaggtgatactatatgggcacctgttgataataaagtaggtatttggcgcatgactattgagttaaatggccatataattgccgataaatcctttaacttattaaaggaagccgaaggcactgccactgatttttggaagcatcgcggctattaagctttaaccttgtgagggactatgtataaaggaagttgtttgtgcggcaaagtaaaagtaacgattgttggtggtatagactctattattcattgtcattgctcgttgtgtcgtaaaaactctggcacagcttacgcaaccaacggctttattcaacgagatgcttttaacctaacagaaggcaggcagcatctaagtgcgtttgaatttaaacccggtagaattcgctatttttgtagcagctgtggcaccccagtttatagcgaaaataaagatgacccaagccgcttacgtattcgcctaggtttattagatagcgatataaacgagcgtccgattagccataactttgtaagctctaaagcaaactgggatacgtttaacacagaaatcccatgctatgatggctttgaaccaagcagagggaagtaatagccatgatagcgaatacaccaaaaccgccttattacgccgtaatctttacgaatatcttatctgacgataccgctggttatgaagaggtggcgaatagaatggtggagctcgcagaacaacaacctgggtatttaggcatggagtctgctcgtgatggattaggtattactgtgtcgtattggcaaagcttagaagcaattaaagcctggaaacaaaacgtagagcacttaaatgcccaacaacttggtaaagacaaatggtacagcgcttttacaacgcgtattgctaaagtagaacgtgattattcattatgatagtcattaatagtaaaaagaacacatcatacaaatttgggctttatttcaatctcagcatagcttggaatttgagctttttaataggcagggtaagtgtgtaggatccaataaggagctcatgaaataattagaaaaatcacattatttggaagtaaagagtcaaaagggtttaaacgtttgtttcctaaaaacactcaatacttgtttaacttaagtgtgcttaatgtaactagcatcacaccaatagcaaagcccattactaaaccacccgataaatcggaactaacaccaaataccgtatccgattctctgatatttgttagccagtgaaagagcatgaacgaaacgctagatattgatgaaagtagaattagctttaccttgttagacacaacaacctcaaatattgacgtattttagttttatgattgttaagtaatagcagacgttgattgatattgcgaacaatcttgaaagtgtgcaattagattagaaaaaagcccacaatagtgggcttagtgtttatcctaactacaaagtgtaattaaaaccgatagctataccatcatcttcggtttgtgacatctgtgcttcttgctcagcatcattacttgaaaagtcactaaaatctttacgtgcttcgatgtataaaatagtgtcatcgcccaaaaagtagtgcaaacctaaaacagcaaattgtcgtttaaatacatcattaggatcagcattaaagtttggttgaatcacgtaatcgtcaccagcatcaaatatgttgtaggctaagaaagtgcggatatcgttatcgaaacggtaactgactaacgattcagaaccgacagcttctttaattaaccgtcctaaattatcagtatcatggttttcatttttattgatattcgctgatgcataccaaccaggtttattaaaatcaccataggtcatacccacaccataaattagatctgttactgattgttttcgcccgccagcatacagaatctcaaattggcctcggtttacacctgctgtaaatttaagttcatcagttgcatagtaggagagggcagcaccataagttgaattaaactcaactttctgagcagcattattaccttgatcccataatgcctgacatgatgcacgcgaaatatcggcgatatcgcaggtataaaagtcatctgattttaattgcgtttgcaatgctatatggaaatttccccagttgttacgatactgcagtactttatcgcctcgaccagtaccatttactgctccatcgtctttattgtaggtgtagaccccagcagcattgccatcccatactaggctgtagtttgtgttataaaccacgtcataccaagcaccccattgcttacctacagtaattcgtccatatttttcgtgttttacaccaacataacctaaacggttgtataaaaactcatcttgcacagtttcaaagcgattattgtaaacaatgtcactattacctacagggtttactccccactctaggaatgccaaggcttgccattcattttttagctggcgtttaaaatccaaatttatacgggatacaccatttacaatttcagtctcaccttgagtgctgatcactctggcatcaataaagccaccaacagtgacactgtttttatcatctttatatatctcaatagcatgactgttaattgtgaccatgctcatactagcgattaatgttgctatgtaagttcttttcatagaaatccttgtttatacatcgtccctaataagtgttattttgcaaaactaggagattatcagagctaaaatagggtaaaaagtgaaaaaaaatcaacaaagatataggttttgaggaatatttattcattttgagttctctatactgaattatcaataagttagtgtagctaaaaaatggacaccttttgacttaatgtttttagcatatcttttgtattgggtttgtctgagcataaaccgtgcaataaggtcataaaatagcagtctagtagaatggccgctttaactttattaaaatgcggttgatcggcaaatattaatgattccatcaatcttatgtgctgctcctgaaacgactcactaaacaaacgatcgctgaaaagaggtttataaaactgatggtgtgtacaatagaattgataaaaatactgtgcatagtggcttatttttaaacgggcagggcggtggatgtctgtttctttagcatgctccaacacttctgcaaatctgttttctaagcagccctctaaaatagcaactttatctggaaaataattaaataaagtacccacagcaatattactggccgccgaaatttgtctagtagaggtgtctgaaaacccttctttttcgaataatgaccaagcagcatctaaaattcgctgttctgtgttattatttctcatgctaacaaactccttgttttataatgattatttgaaaagtgagcgcgctcacattcgtttgtgagcgtgctcattttatgtgcagttcagcataggtgctgtatgtcattttgtaaaactactgagttgatttatttaaactatcatggcgtgcaaagcggctttagtttaaaattgcatgcagatttgtttttactttttacccgctggagggtaccgctatcattagtacagctaatatcaccatgcaatttggtgctaaacctttattcgaaaatatttcagcaaaatttggcgatggaaaccgttatggtttaatcggtgcgaatggctgtggtaaatcaaccttcatgaaaatcctaagtggtgaacttgagccatcttcaggtaatgtcagtacagatccaaacgagcgtattgctaaactaaatcaagatcagtttgcttatgaagagttttctgtgatcgatacagttatcatgggtcataaagagctgtgggaagtaaaaaaagaacgtgatcgtatttatagcttaccagagatgagtgaagaagacggtatgcgagtagctgatcttgaaactgagtttgcagagatggatggttactcagcagaagctaaagccggtgagctactgattggtgtaggcattggtacagagcaacactacggtcctatgtctgaaatcgcaccgggttttaaactgcgtgtgttacttgcacaagtgctgttttctgatccagatatcatgctactggatgagcctaccaataacttggatatttacaccatcaagtggttagaagacgtgttaaaccaacgcgactgcaccatgatcatcatttcgcacgaccgtcactttttaaactcagtatgtacgcacatggctgacatcgattatggcgaacttcgtatttacccaggtaattacgatgaatatatgtttgctgcaacacaagcccgcgagcgtttactgagcgaaaatgcgaagaagaaaagccaaattgcagaactacagcagttcgtatctcgcttctctgcaaatgcttcaaaagcaaaacaagcaacatcacgtgctaaacaaatcgataaaattcagcttgaagaagttaaagcgtcttctcgtcaaagcccatttattcgttttgaacaagaaaaacagctattccgtaatgccttagagctaactaacttagcgcaaggttttgatgacatgcttttcagtggccttgaaggtctagtcgaagtaggtgagcgtattgcgattatcggtgagaacggtgttggtaaaacaacattattaaatacccttgcaggtcgcttagcaccaaaacaaggtgaatttaaatggtctgataatgctaatattggttattacgcgcaagaccatgctgatgagttcgaacaagacatgaacttattccagtggatggaacaatggcaacaagaaggcgacgacgagcaagttgttcgtagtttcttaggtcgtatgctgttttcacaaaacgacattaaaaagtcagtaaaagtgatttcaggtggtgagcaaggccgtatgttgtttggcaaaattatgatgcataaaccaaacatcttattaatggatgagccaaccaaccacatggatatggaatctatcgaagcgcttaacttagcacttgaagcatacgaaggaactttattattcgtatcacacgatagacaattcgtatcatcacttgctaaccgcatttgggaaatcaaagacggcaaagttatcgactttaagggtacgtatactgagtatctagcaagtaaagaagcttaattcgtttatgagtgattaaaagccatgcatgtcatggcttttttgtgcttctagagtcgcatcttgagatggtttgggtatatacccgccgcctcaagatgcagaattcagcgtttcacaggtgcttaatatcaaggcgttactttgtaggaatggcaatcccttttaagaagtaacaacgatgagagtaagtgcctgtaaaacgcccaaagggttggtttaaaagcgatttatactgcgtttttgattttaacaatagaaccactattatttgcaatcaatgccttgcctaaatcgcttttaattccaactgaaactcgcatcttgagatggtttgggtatataatacccgccacaaaataaggacaaaagtccgctttttagaaaacaatttactgaggtgtatttatgactgttggcattattatgggttccaaatcagactggccaacgatggaacatgcggcgttaatgctagaaaaattcggcattgaatacgaaactaaagttgtttctgctcaccgtacccctcaattacttgctgactatgcaagctcagctgcagatcgcggcattaaaattattatcgcaggcgccggtggtgctgcacacttaccaggtatggctgcagcgtttacatcactgccagttctaggcgtacccgttaaatctaaaactcttaatggtgtagattcgttattatctatttgccaaatgcctaaaggtgttgcggtaggtactcttgctattggtgaagcgggcgcagcaaatgcaggccttttagcggcacaaattttaggttgccaacagccagaaattttcgcaaaagttgaagcattccgtaaagaacaaacagacactatcttagctaaccctaatcctgcagagtaatatgaatattctaattttaggtgcgggtcagttagctcgtatgatgagcttagcgggcgcaccccttgatttaaatgttgttgcctacgatgtgggtagtgaaaaaatcattcacccattaaccggtgaagttcataacagtacattacaacaagctattgatagcgcagacgcaattacagcagagtttgaacacattcctgatgatgtactaacactgtgttgtcaaagcaacaagttttacccgggtaaagcggcgattaaaacaggtggcgatcgtgcacttgaaaaagcattacttgataaaacaaatgttgagtgcgcgccttatcagctaattaccgaaaaagcacatcttattgctgcggtagagcgtttaggtaagccacttgtgatcaaaacttgccaagcgggttacgacggtaaaggccagtggcgcttaaaatcagatgatcaaattgaccaaatctggtctgaaatggcagatttcattgcatctggtaccgacagtgcaccgcattctattattgctgagaagatgatcccatttgaccgcgaagtatctatcatcggtgcacgcgacaaagcaggtaacacagtaatttacccattaactgaaaaccaacacactaacggtgtgcttacactctcagttgcaggtaaagaaaaagctgcaattcaagaacaagctgagctggcgtttaacaagctagcaaaagaacttgattatgtgggtgtattagcaattgagttttttgatgttcaaggtacgttattagtaaacgaaattgcaccgcgagttcataactctggtcactggacacagcagggcacgcattgctctcaattcgaaaaccacatgcgcgctgttgcaggtttaccattaggcagtacagaattgcttcgtcctactgctatgatcaacgtgttaggacagccttcaattccacactcagtacttgccactcaagatgttacaagccactggtatggtaaaacggctaaaccaggtcgtaagatgggtcatatcaatgtatcagctgataaccttcatcaattaggtgaacgtttagcggcacttgctgaaatattgccagagcaagactacccaggtgttgcagctaccagcactcaacttattttaaactaatcagtttaaataattaaaagccgagtttatctcggctttttaatttttggccttacgcgcaaacttcgctaattttgtacctcttgtctcaaagcacttgcgtcaggtttttcttcctatagactaatatttttatattaatattagcttgttatgttacatcctcgatttagaacagtcgtgtttgccttttttatggcgctgtttatgtctggatttatgtctttagtgatcagcatttttaacgttggtttaatcgataacattacaaccatttggcttaaagcttgggcttttgctttttgtgtggcatttcctaccgttattgttgttgcacctctggtacataaattaaccaacaaactaatcagagtgccgttgtgatagctgaacgcccaaaacaatttctttttattacgctctttttagcatctgctttgccatttgttggttctgctacggcacttatagtcggtgcactatttgccatgactttaggcaatccatttgcagctcagtcacaaaaatttagtaaatggatgctaaagttagcggttattggcttaggctttgctgttgattttaatcaagtaatagaagtagggcgcagctctattgtgcttacaattgtcagtattaccgcgattattggtcttggtgaaattttatctcagttatttaagttaaataaaaacaccggtgtacttatctcatttggtacagcaatttgtggtggcagcgcaattgcagctatggccccggtgattaaagccaaagatcacgaagtggcgatatcactcgctgtggtatttttattaaacgcccttggcttagtgttgttcccgatgattggccattattttggcctaactgaacagcaatttggtgtttgggcggcacttgcgattcacgataccagtagtgtagtgggcgcttcagccgcttatggcgcatcagcacttgctattgcaacaaccattaaactaaccagagcaatgtggatcataccttatacaagcatcgcgggtgtgttttggaaatcagatgaaaaagcaagtatcccattgtttatatttggttttttagcggctgcactgattaattcaagctttcctgagtatcaaacactttggcatgcactcaatgttggtgctaaacaaattttggtaatgaccttatttttgattggtagtggcttatctatttcagtcttaaaacaagcaggtattaaaccttttatcatggcgatgatcttatggatcattgtcagcagtattattttactacttatagtagacggatttatttcatgaaaaacgctttattaacttcttctttagcactggctgtaggtgtatttgctaacaatgcagtggctgctgatttacgtgttgctacctttaacgtgagtatggatgcaaccaactatgctaaaaaaggcgaagctattgataaagatgctttaagcaaagcattagcgagcaaccaccagcaaattcgcaacattgccgaaataattcagcgagtaagacctgatgttattttactcaatgagtttgactatattgatgctgataaaggcattaacgtatttcgtaaaaactacctgcaggtatcgcaaaataagcaggttgccatcgattacccatactactttatcgcaccagtcaacaccggtttacctaccgaatttgacttagataacgatggtgtaaaggggcattacaaaggtgacgcacacggctttggcttctttgaagggcattatgcaatggctgtactttctcgctacccaattgatttagataaagcgcgaacattacaaacattcaaatacaaagatatgccaaatgcacaaatgcctatcgaccccaaaacaggtaatgattggtattctactgaagaatggcaagcgattcacctaagctctaaatcattttgggacttaccgattgatataaaaggcaaaacagttcatttacttgcgtcgcaccctacgccgccggtattcgatggcccagaagaccgcaacggtaagcgtaaccacgatgaagtgcgcttaattgctgattacattaacaatgctaactacatttacgatgataaaggccaaaaaggaggcttaaaagcgaacagccgttttgtaattgttggcgatttaaatgctgcgcctgaagggggcaaggcacgtccaaatactacagaccagattttaaaaaacccattagtgaatacctcttttacgccaacaagcaaaggcgctaaagaatcgtataaagaagattatgctaaaaactataccgcttattggcaagccagagccgattacgtactgccatctaattatggtattgaaataaatgacggcggagtattttggccaacagaaaactctgagttattcagattaattgaggatcgcaatgcctcttctgatcatcgtatggtatggcttgatatcacattgaaataagctgctattaaacggaaaagtttggctgtttatcctataaaaattgctatttcatcagtgcttctgcttaaataaggcgaattataattaccctaaagaagcactatgaatttcaaaaccactgctaataaaacgttagtggctctcgcagtcgcatctagctttatgctagctggttgtcaatcaaccgcctcaacgccttctgaagaacaagttaccaatgtagcacccgttgtcgttactcctgctgacacaggttccgctgaaatcacgttagagcaagcaatggctcaccctgattggttaggtcgtcagcctgagcgtgctttctggaacggtgattctaacagcatcgtttatgcacaaaagcaacagggcaatgagttacgtgatttatacgttcaagcaattaacagccaatctgcatcacaattagcgttaaataaactacacactgtaggcgctaaaaatgctgtttattcagcagataaaaagcaacaggcttattcatttgaaggtaatatcttcgttaaaaacttaagcactgggcaaattactcaaattactcacgatagcgcacagcaatcaaaaccacagtttttaactgatggtagccttgcttttcgtcaaggtaatgcattttataaagttgatttagcaacgggtcgtcaagttgaattagtaaacttacacctagacgatgcaccaaaaggtgtacaagaacctgacacttacattgcaaaagaacagcacaaactaattgattacattgcgctgactcacaaaaacaaaaaagatcgtgaagagcgtaaagcacaaatcaacgaacaaaacgacagcattgctaacgcgcagttttacttaggtaaaggcaaacgtttagcagatgttcagctttcaccaaatggccaagcactcgttgcagtaaccactgagaaccgttcatggcgtgatgaaggcgatatcatgcctaattacattgccgatgatgcacgtgtaaaggctgagaaagtacgtcgtcgtgttgctgatgaaaaaccaatcagctcagatgttatctacatcgaccttaaatcaggcgagcaaacaacccttgcattcgataccttacctggctttgatgaagacgtacttgcagctgttaaaaaagaaaactacgcccgtgaaggcaaaacctacaagtctgaaaaagcaccgcgcgccatcaatctaatgatggattggggttgggaccaaagtgcaatccaatggaacacagatggttcacaagtggcacttatgcttgaagcatgggacaacaaagatcgttggttagccactgttgatacacaaaacaacaaacttgtttcacagcaccgtctgcatgacgatgcatgggttaactatgcatacaacgattttggttggttaaacaattcagatacgctttactacttatctgaagagtctggttacagccatatttacaaaaagccacttaacggtaaagcaacacagctaactaaaggccaatttgttgtttctaacttaacgttaacagctgataactcagcgatttactacaaagcgaacgttgagcacccaggtctttacgaaatctatcgtgtaaaccctgcaaacggtgaatctgagcaagtaaccaaccttgatggtatgactgattaccagttaagcccagatgaaagcaaactattgctaactcactcaaaaattatgtcgccgcctgagctttatgttgctgatgcaaaagcaaatactcaagcgacgcagttaacgcacacggtttctgatgagtttttagccaagaaactgatcgcacctaagattgttgctgtaccttcaagccacactgatcagccaatttacgcaaaagtatattacccagctgattataaagaaggcgaaacaggtaaaaaccgtaaagcggttatctttaaccacggtgctggttacctacaaaactcacacatgggttggtctggttacttccgcgagtttatgttccactcactactggcttcagaaggctacgtagtaatggacatggactaccgtgcatcaaaaggttacggccgtgattggcgtacagctatttaccgtcaaatgggtacacctgagatccaagatttagcagacggcgtaagctggatggcagacaacgcaaacgttgatacacaagctgtaggcacttatggtggttcttacggtggtttcatgacgtttatggcgttattcacacaacctgatttattcaaagcaggtgctgcacttcgtccggtaactgattgggctcactacaatggtccttatacgtcgaatatcttaaatcacccagatgttgacccaattgcctatgaaaagagctcaccaatttactttgctgaaggtcttaagagccatttattaattaatgcgcctatggttgatgataatgtattcttccaagattcagttcgcttagtacagcgcttaattgaacttgaaaaagaaaactttgaaacagcgatcttcccagttgagccgcatggttttgtacaaccatcaagctggttagatgaataccgtcgtatttataagttgtttaaagaaacgctttaatcaatagcgtaaatgaaaaacagccactttaagtggctgtttttgtttgtaatagaatttatctctatagggttatttgcagtaaaatttactcacatcaagtactgtcttaccttcctctgagtcgttttcaaaaattaaattatcaccctctaaactcattttatagtctctcatccatgatatattggctattaattccaattcatagcggttaaacgaagcagggcactttaaatacacataatggtgagcagttccaaaagctccagggtctgatgtgtagacataaaaggtgcgatattcaaatgcctgttcttggtgaacgtaatcagtatttgagttaaacatgatattgaataatataagtaaaccaataccaaagaacattaagcatgaatacaaaatactaataataagggtcaaatgagcaaaaatcttatttttaaacgattctttaacgatactgtattttgctaacaacagacaaaacccaatacaaatagagcaaaatactatggtgtaataaatattatcaagacttgccataaacgttggtgaaacaaattttaaatttaccaataagccaaatagcccggccaagaatggtccgtaaaggcaaaataggataatgcgaaggtaaatatgtcctttattttcattcatttaaagttccttttagagttaaaaagagttgtaaaaagcgagtagggctacccgcgattttttattatttttataaagataggcaaagcgaggagtgtgccgccaattgcgccgataaagtgggcgtcaatggcaatattagaggcgattaactgactaaccgattcactcgggcctgctatttgctcccaaatcacttttgcccacgtacccgcaaacaataaccagcctgaaaacatgcctgcttgtacgtctttaattgccccccaaatgatcacaccgtgcagtaacgcgcttaatccggtgtaaatatggatatcagggcaaaatagccacacacctaaaccacaccacaatgcaagaatagcaatattaaatgcataacgaggtgggcttgtatgctcagcatgtagagcccaaattaataaaattccggcacaatttaagcctaagtggggccaatttgcgtgtacgaattgactggtgaaaatacgccaaaactcaccatttgcgactaactcacggttaaattcgagatattcatttaagttgaaaagtgcaaacaaggaacttagtagtattaaacacaatgggggcagaatatattctagtttcaggggcaggtttatcatgttatttttgttgtatctgagattgtgacactattgtgcacgtttaattttaagatgccaaatacactacgggattaagtatatttatgttattcaaaaccaaagctttgttagctctttccacttcatttatctattcaacggctcttttagcgactcctgcaaaagttgaaacacgcgaacccgaggctgcaaccggctttgcccataaacaggttgttgaaggcgataagtacatggtcgcagcggcaaacccttatgctgtaaaagcaggtcaaaaaatgcttgagctaggtggctctgcggttgatgctgctattgctacacaattagtactcacactggtagaaccgcaatcgtcgggcatcggcggtggtacatttatgatgtacttcgacaacaaaaccaaaagcctaaccagttttgatggccgcgaaaccgcaccaagtaacgctgatgaaacactgtttttagataaacacggtaaagccgttaagtggattgaagccgtggtaggtggtcgctctgttggtgtaccgggtattttagatgcctttgcttcagcacataagcgttatggtaagttagagtggcaaactttatttggccctgccattgaattggcagagcagggctttattgtgtcaccacgtttgcatcaattacttgccaaagagttaaacccaggggttacaaagcttcctgttattcgtgattactttttccctaatggtaaaccgcttgctgttggtacggtgaaaaggaaccctgaacttgccgcgctttataaagatattgcgaaacaaggcattgatgctttctataaaggtgaaaacgccaaagaacttgtgcatgcagtgcaaaactcagcggtagcaccggggactttatctgttgaagacttagcgaattataaaagcaaagagcgtgctccagtatgtgttgattatcgccaatacgaggtttgttcaatggctccgccaagtagtggtggtgttgctgtattacagattttagccttactcgaacataaagatatggctaaactaaaaccaaattcagtacaagcgttgcattactttacccaagcatcacgtttagcttttgctgatcgtaacgtgtatatgggcgaccctgattttatgccaatcccgacacaaggattacttgataaagactaccttgcaggtcgtgcaaagcttatctctgaaaaagatgctcacgcagaagcaggtactccgccaaactcacttgcttatgcacaagatgatgcttacgagctaccttcaacaacccatgtatcgattgtcgatagccaaggtaatgcggtttcgatgaccagctctattgaaatggcgtttggttcaacagtaatggtgaacgggtatattttaaacaatcagcttacagactttgctttatcaccaacaaaagatggcaaacctttagctaaccgcgttgaagcaggtaaacgtccgcgtagttcaatgtcgccagtgatggtgtttaacaaagacggcagtttacgcttagttgtcggttcaccgggtggtagtcgtatcattgattacgttgctcaagtagtagtaggtgtgcttgattggaacttagatgcgcaaactgccattaatttaccgcgtattactaatcgcaacaattatacaagccttgaaaagggcactgaacttgcgaacttggaagctgattttgttaaccgcgggcacacagttcgtatcctagatttaaactctggtttacatgctgttgaagtaaaagacggtaaactttatggcgcagccgatccgcgccgcgaaggcatcgctttaagtgataaaagccactaaaaacaagctcagcagccttaaagctgctgagttttcatgtatactattcgttgtgccgtttagggcataaaattcattttcttcaatggtctgacaaggtgaattgtcattgcaatttcgcctttaagagtaataatgtcaggtcataattatgacgcatcaaagcttggaaatatgactacaaataccgatccaaattatctttatattccttattcaggcccaggtctgatcgaaacgccactattaaacaaaggcagtgctttttcacaaaaagaaagggaaagtttcaacttagccggtttactgccaccgcgttatgaaacaattgaagaacaagttgagcgttgttaccaacagtattcaagctttagcgataatttaaacaagcacatttaccttcgtgcaattcaagataacaacgaaactctttactaccgtttagtacgtgatcatcttgaagaaatgatgccaattatctacacaccaacagtaggtgatgcctgcgaaaagttttcagacatttaccgcagtgcccgtggtctatttatttcttacgaagatcgtttccaaattgatgatattttacgtaacgctactaaaggcaaagtaaaagttatcgttgtgactgacggtgaacgtattcttggtcttggtgaccaaggtattggtggtatgggtattccaattggtaaattgtcactttacacagcgtgtggtggtattagcccagcttatacattaccagtgatgattgatgttggtacaaataacgaaaaactgcttaacgaccctatgtatatgggggctcgtcataagcgtatttcgcaagaagagtacgatgaattcttagacctattcatcaaggctgttaaacgtcgttggccaagtgttttacttcagttcgaagactttgcacaaccaaatgcaatgccattattaaaacgctaccgtgatgaaatttgtagctttaacgatgatattcaaggtactgctgcggtaactgtagggtctttattggctgcatgtcgtgttaaaggtgcgaagctttcagagcaaaaagtggtatttgttggtgcaggttcagcaggctgtggtattgctgagcaaattatcagtactatggttgctgaaggcattagcgatgagcaagctcgctcacaaatcttcatggttgaccgttttggtctactaactgatggtatggaaggtttacgtgatttccaacaagcgctttgccaatctaaagaaggtttaagtgaatggacgtatagcggtgagtacgcatcactattagatgtaatgcactgtgcacaaccagatatcttaattggtgtatctggacaacctggtttattcacagagcaagttattcgtgcaatgcatgcatcttgcccacaaccgattatcttcccgctaagtaatccgtctaagcaagtagaagcacttccttcagatgttattgagtggacagagggtcaagcgattgtagcttcgggtagcccatttgatccggttgagtataacggccaaattttcccaatcccacaatgtaacaatagctacattttcccgggtattggtttaggcgttatcgcagctaaagctactcgtatcactgatgcaatgctgattgtttcaagtgaaacattggcagagtcttcacctcgtgcaaacactggtaaaggcagcttgctaccagcgttaaccgaaatccaagcgttaagtaaacgtattgcctttgcagtagcgaaaaaagcgatggaagaaggtgtggcacttgagttaagtgatgaggctttatgggctgcaatcgagaaaaactactggcttccagaataccgtaactataagcgccgtagtatctaaactatatcgctttgagtggttaaaaaaacaggcttttaatgcctgtttttttatatctgaataataggggttgttcatattgaattaaccctttaaggtgataatgaacggagtttttaattaaggaacagtattatgcgtaagttagtttttaccgctatggccgccgcacttagttttaatgtgttagcacaagcaacaccagatgcgccgcatatttatatccaaggtaatgcaacggttaaagcaatccctgataacgttaagttaactgtaggtattgttgaagtagataaagatttaattgccgctaaaaacaaagctgatgcaaccatggccaaagccattaagcttgctaaaagccaaggcgtagaagaaaagggcatttatgcgtctaatatctcaattcaacgccaaacagaatacaaccgtgaaacaggcaaacaggaatttgtagggtacagagtatcgcgtagtctgtctgttactctaactgatattaaaaaatacccagttatgcttcagcaactagtgaatgcgggtatcaacgaaattaatcaaacgcaatttgtatcgagtcgctatgaagagctacaaaagcaagcgcaaaagctagccattaaagatgcgcgtgctgctgcgaaagagtttgccagtgattatggggttgaactcaaaggcctttatactgcatcaagcagcccactcgatacaggaagccaaccttacatgcgtgctagcaaaatggtaatggcagatgctgcaccagaaaactatgtacctgatgcatacaatggtggtgagcttactattagcgcaagcagttatgcagtttattttatcgaaaattagtctatttattgttgctggtaaagcgcgccagcaacttttcaccttgttgctctgaaatacgggcaatagcttttagcatattagtaatttgtttacggtcgtaatcattactaatatgcgtatctatatcttcaataatcgcccctaagtaaataaacaaactcttagtcgctttttcgttatcagatgctctaaacaatatgtttttaaacgcctcaagtacgttaaccattacataggcgtcattttttgcataattgcgaataggtgtgaagttatcatgcagcagctcatcgaatgatgtttcatgtaaaaacaacttaggatggttatcatcacattgtttaagcgaataattcacatcataaatgtctaatcgcaaaatgagtaaaatactcagcatatcaatagcttttactgcagtacctggatcattaatgcccggactcattgccttaacagcaatctcagatatttgcgtcattccatatcggtaatgatcactaacatattcttcaatgtaaaaaataaagcatgcaagtagctcatcaatgagctctggtttgtcagttaaatcagtatcgcactttaaaaatgggtaaccttttacagtaaaaaaaccttgtttaacagagatataaattttaatgtcgtgctctttacagatagcgcacaatttatcgctgtgagcgcctttaaaataaccttccgttttactttttatgctgtaccagtcgtcaaagttcggaaaatcatcaacaggatgttcatgctgcatagctttaatgctattaagttcacttttagtatttttgaataagtcattcagtacattatcaacttggatagctctggatatagagtgaataaaataaacaaagaaacccagtgaaattaagccaagtaccagtgatataaatatacccagtgaagggatgcccatattgccatttcctatggtacgaatattgatgagcattagaatggtgtaaattatactgcctaaataaaagcctaaaactagttgatgagatttacgagttataagtccgggtaatacccgaggagaaaggctggcgctggcgctatttaacacgaccataaccatagagaagctaaatacagttaacgaaataatgcttccggctaaagtactgaggatggtacgtgcattttcttcactgtctactagcaatacacttaagactttcttaacactcattgctggatcagaatactcaacagctgttgtaattaaagcaaaagtcaaaaataaaacagacagcatagacggataaaatcctatgctgctgatcatttcacggtaattatcggctatttttcttggcgtaatcatgcacttccttaagaactgttagactttaattaggattttgagctaacctagcaaattatatgtcagcctagcaataaacagtgctaggcgtctaactttaaataataaatggaataaattgtgatagtttcaacttttgctgctattttggctattttgtatattcaacttagctttcgcgttattaaaatccgtaaagctaagcgtatttctttaggagacggtggtgatgcaagtttacaagccgcgatccgcacccatgctaattttatagaatatgtgccattttctttaattctgctatttttattagagtatcaagggttacccagccattttacttatattttaggtgcgatgttattagtaggtcgtttttgtcatagttatgcattagcagatgaaaaaatgcagctacgcgtcgttggcatggttttaacgtttttaatgatcttcataagttcggttatgttattaataacacaggttttttaatatgataagagttgtatttacgattgcattcgtatttgtttcgaatcaagttgccggcagtacagaagatacagctcatgtcaaaaaatcaactattccaccaaaagttttaaatataatttatcctaaaaccttgcccagtttagttgaagaagtttattacccacttattttgttggatacagcactaaaacgcagtggctacaaatacaaattaactgctgcaccaaagttattaggtcaaaatagggtattaaaagaaattgaacatggcggtgatatcgatgtcacctggactatgactaacaaagtaagagaagacaagttactgccggttcgtgttcctatatttaaaggcttgtttggttggcgtttaatgttcacaacagaaccgaaactaccttatttaagccgactaaaaaccctcgacgatttaaagaaagtttactttgtacaaggacaagattggcccgatacccaaatattgcgtgacaatggcttggttatatcaacgtcaggaaactttgattcgttgtttgttatgctcgacagaggccggggcgacttattcccacgctctgtgcttgaaattgaagatgaactagcagtttttaagcaacaaatgcctctggttgtattgcctcatttaatgttgaaatacaccagcccaatctatttcttcttcaacaaagacaacaccgcagttgcaaaagcagtcaataaaggcttacgcataatgatagaaagcggtgagttcgatgaaatcttttttaaatacaatggtaaattaatagaaaacgcccatattcatgacaagattattgtagaattagaaaacaaagaactaccaccgctaacccctgtaggcgataagtccttatggttaccgatccaaaaagttaaatgaacaacaaaatatttattattggcctacctcgcacaggcaccaccagtctctgccatagttttttacaattgggctataaaacggcccacacagcgtataccgaaacagccttaaaagatgcagacgttattgctgatactcctgtttttagcgaattcccgttattagatacgcactttgctaatagccgctttattaaccttgaacgagacttgtctaaatgggtaccttcgatccgtcaactgctggcccgaatgcacaccaatttaatgcgaagtgacggaggctttaacacgcatttaaagcgttgctactttgagacatttggtaaatattcgttagcagatattcagtctgatgagtatttgattaactgctatgagcaacatcaacaacgtgtttctaatttctttaaagagaaaaaagccaacctattaacgttaaatgttgcacagccacacagcgctaaagcgttacagatatttttaggtacagatgtagatatacagttcgagcagctaaatatgggtggtaaagtaacggcttggaatgatattaaacaccccgataaaattgcctccaccagaaacggcaaaattgataagtcacttggttacaatcacaagattttataacagaaatacgctaaaatcgccgccattgttagttaagtagttcgttatcatgtttgaattaaaatatcacactccatttgagtggacagaaggtgtcttggcagattttgatacctttttacaagatcatgccgctgctgagaagaaagcctcaggtatggcaatgtcaatgctatcgcattatcctgaccgtcgtaagcttgtaaaagcaatgacagacttagctcttgaagaaatgatacattttaaacaagtacttaagttattaacggaacgtgatgtttcacttggtaatgaccaaaaagatccttatatcaaacaaattcgtgcggtattcagaaacggtcgtgatgagtttttaatggaccgcttactcgttgcaggtgtaattgaagctcgagggcatgaacgcttttcattggtcgctgaagcattgccaccgggcaaagaaaaagagttttatgttgcaattgcaaagtctgaagaaaagcacaaaaacctatttgtagagttagcgtacgagtattttgataaacacgaagtggatgcccgattagaagaaattcttgtggccgaagctgaaatttgtaaaaaaattccgtttaccgcggcactacattaatttaaatacttatgtattaggttgtaaaacctaatacataaaataggtacttataaaacaataattaagtattttgtaaatacttacaaccagcccaattgattaaataaacggtaaatcattcatattatctcctatagttaaaatagagcttttaacagggatagaagtatgaaatggatgatgactcttacaaccctttcattaattgggattgtttttacaggtaactcgatttatacagagctaaaactatataagtcgaataaaaaaccgacagaaatcagtgctagtatgtatcgttcgctaatttggcacagtgatgtatataaagataacgtgtttttatataccgctgaacagtattttagtgatggtatcatcgacaccagtgaatatattaaattaaaccgcttagcaaaagaaacctcagggccacttatatttattcagcaagataatgagcaattatggcatgctcgtttggcctataaacaatatcttgaagtacatgcattaacacaggttgcatccttagactgaatttagctgcataaatgctttaatgagtggtttaagttcaacaatggtaggcttgccactcaaataatgagtatctatatgataagtgttgccaagccaataaggttcagcagtggtgttgtggccatgcacagaaaagtctatgctggcatttatctttgttatcgtttgcttcacaattgtgcgattccacaacaacgatgccgcagcatatggtttatgctcactaggagcttgccaattccaatctgcagatactgtgtgcgataaccctatttgcatacctgcatagtcaagcaaataagaaagagggcagtgtaaaagctgctcagttattgcttttaattcatcatcggttgcttgagtatgccaacgcccaccattttcaacccatagtgaatagtagctatgatcatcggcaagtagcgactcaagcatcatgtgctcatgattacccagtgtcatataaacacccagttctttaaagcgtgataacaacgcaaaattgtcgttgcctctatctattgcatcaccaagtgaaaataaaacatcgttgctttcatcaaaatcgacagcgactaaagcttgctcaaacttagctaaattagcatcgagatcgctgataataaacacacgtttattttcgtttatcttaagttttatttgcgttgggttattggctatcgcttgacagttaacgtgcttcaaaatcctttcctttaatgcaatatcaaacaaaccctaacataaattgttgccaatttaatactaactggctagtataaagggcataattttaggagtaatagccaacatgaacaactaaacctgttatccatttttacatttttctttggaacaacagggctagtaggcgttgctcactcttgtcagtagtataaatcaattaccattttggtggtcatacgcttagttcaattcgctttataattaaacgaattgcattactgtccctgtatagcaggaggcagtatgccaaaattacaagcagccaacttatcatatcaacacgccaatggcggccaagttctgaataatatttcagtgtcattaaatgctaaaacaacagctttagtagggcgaaatggtgtagggaagtcagtattagcatcgttactttgtaatcgccttatcccgtcgtcgggtaatgttgtttgcaatggtcaacttggtttttatgagcaaatagttgatagtcactcattaaaaaataaaacgattatagacgtactaggtcttaaccactatttcaaagcattacagcaaataaataacggtcattttacagagcacgaacttaacttacttgatgggttttgggatctgcccgagcgattttatgctgagttaactcgtttaggtatttatggtattaatgcgaacagctgtgcaacagcgttaagtggcggtcaactaagccaactcagattatgggcgctatttaccatacaccacgaaattataatccttgatgaaccttctaatcatttagataaacaaggtaaaagctggcttttaaatcacatagaacaattcactgggcagctacttttaataagtcatgaccgtgaaatactgcaagtagccgatgaaatatgggaactcacatctatggggttatcagtgtttggcaccgattttagtgattacgtaacccaaaaaaactaccagctagcagcgcttgaaaataagctttctcatactactaaggagcaaaataaactgctattagagcagcagcgcagcaaacaaaaagcagcaaaaagagccgctaaaggtgtaggaacaagaaaatctggtagccaacctaaagtgcttatggatgctaaaaaagataaagcgagcgctaatttatcttcgcaaaataaaaataccgcaaaacgagaagagctacttaatagtaataaaaaacatatagttaaccagctcgaacaagtaaaacaacagcagttttattttaataatcctgacactaaacaacgcaacgcactaaatcttgaaaacgtaattttacaatatgggtcgcaaacccccattaacctacagatattcaataatgaaaaaatacacttaattggtgtaaatggcgcaggaaaatcgacgctactaaaaaccttaacaggtgagttaaaaatgagagcagggcacatacataggaatagcccgttgttgtatttagatcagtacttttctttaataaaggcagagctaactttgcttgataacttaaaattctactgtaagacccttgatgaaagcaccgcacgtacattattagcaagcttaggctttagaaaacatgacgtattcaagcaagcgacacatttaagtggcggcgaaaaaatgaagctcgccatgtgtatcgtcagtaatattgaaagtacagcatttttgttattggatgagccagataatcatctagaccttgaatcaaaacagctcttggctcaatcattacaaaactttaaaggcggatttatcctagtaagtcatgataattactttgtagaaagcatcggctgtaataagcaaattgttcaataaaatagccagttacaaataagcgtgctaaggtggttgtaggtactttataccaatccgcaataatacttaatcattttgagggattaaacctgtcgctatctgcgttaaaaatttctgatttagaacaactaaataacgaaatttttgccttgctatcaacgaggttttattgcctcaaaatagactacttaattaagcgaattggtattacaaggaatgactatgaattttacagccgcttaccgcgtttttactgctttatccatgctgattgtaaccataggcttaggcatgaagctctatgattttacttcggtgatctacgtgttcgtgccgttattactgatgctaggtacgtcatttatgccattctttaaacagcgaaaattgcgtttaattttctttgcagccccaattgttattctttacagctttggtttttacccttggcttacaaattatcaagaagtcgccgttttatcatccacttcaaccctcgatttttataattattccattttgggctaccctctacggcgcgggttttgtggtattgaatgaaattgggctaggtgttgctagggcgtttaattgggcaaagtgaaagagttattagtctgattatgtgagatacaaataaatttgcctatatttttttatagagttaaaaaacgtcaaaaagtcctttttcttttaactactttttatctaatcagataaattaactgaacattaccaagagatttatcaagactaacttacttgctcacttagagcaggtacttttttattacagaaatcctagatgaaattgtagaagttacctgggtaagtaaggcgccgtcttatttgagcgagttgtgctgtaaggttcgtaagtatggcggcagactattagacattacccaacggacacaagaatcagataaaaccatacttaaccaagttgaatctatgtggtctgctcaagccggtggaaggttacaagtacatggctgctgaaatggggttaactgttcaagaacttcaatcactagagagcattgattgtaaacaaattcagaattggttgcgaaaaggaacagatttagtgaaacttgaaatagtatactttagaaggagttagtatgattcattttttggaaagaacgttgtttattttagctgctttccaaccattaataactttttttataggttgtgcagctgtatatgtaagctacatcacatataaaaatgcaagactagctagagaacatacgttagagtctcaactgtttagcatgaagagagatatcagggtatgttgcgcagagcgtattaacaaccatagtagatctttaaatgatttggaggatggctactatcaattaagattaaagttacatccgacgttcagaaacgcaaatcaaacagtaatagatttttcgaagctcattgaaaccaaaaaaatagatttagataatgcagagaaagaagtcagtgatgtaatttctaaaatccctaacttatttacaattaaagatgctgaagatttacttttagaagaagaacaaaaaagagttgagtctgaaggtgatgtgacttttactaaaagtaaagtccaaacattaagtgaaatcattcttaaatcaaacgatgaatttataaaaagaactgaacttgaagataaagttgagctttataaaagcatactttagcgtgtgttaatgtctgaatttaaaagccctttattcttaactgtgcaactacatttggagccgcaccttccaagtattacagccgttgaaccttataacacagtttctttagaagttcccgttggtctgacatacgacaaaatccacttcaaatattcagacacctaaacagattggtaactacaagttttaattgatggtttagttgatgctgagaccataactctagcagctaaggggtagggcatgacagtcgattcaaactagcaagcaagtcagaaaataagcttgatgatgaattagttagtgcattgtctgaagctttaaagtaagcattaaaacaacccgtatattacgggttgttttagaaaatttctttttcatcgatttctttcactagttttatgaattgagccacggttgccgctcggttgaatttatcagcacgaagctcttctataagactacttttatgttggtcacaaggtttattataatagtgtaagagcacatagattattgctagtttaaactcagcaatatgtatcagaagtaagttaatatcttttgaaaacttatgttttataaatttattgtgatatgtcacatctttgaattgagtatcaatatcagttgatatattttcatacttactagatatattcctaattcccattcttcttttatttagctcatcttcgccaatactttctcgctcctcaatgaagctaagtaaatacgcctttaaatcagcgtagtctgttttaaagtcttcccgaagcgggcgaattgttttcacaataaaatttctaaattcattatcagatttaaatattttaaatgaaagatactctttagttgtaagtgtaactgcaataactgtaagaactccacctagaaagctagcaaaagatgttagaacttggaatgaagggcctttttggatgattattacaaatccaccataaaataaaaaaacaaatgaaaaaataataattaaagggctaatgtacttaataaaacccattataaattttaaatgaagtttagaaaaaagctcacgaagctttacactaaaggtatcgtttgacctttgctttgtgtgggtatcagtaaattcgattaaatctaatgaagctaatgtcatgttttttattatttcaatgtctttcatttaccttccttgaattttggagtagatagctaaaagctatctactaatgttaggctgttttcttatctccatactttaacacaatatcttttaaagaaagttgatcactcattttgattaagtcattgccaatgatattcagcgtctaacttacttaaaccaaattgtacagctatccaattttaacttgtagggcatctacgtggctttagataaacgaacagtttgttgtacaaatcaatttcatagttaatgaacttaaagccacaacgattattggctgtgaaagcaaaattggttttatatttttgtggagccggacaagaaagacatatcaaatctaggcttgtaaaagttctatgaaatgaagcaattcatagaactgtttaagaatcaaaatgagcacctattaaaaagctataaattcgtgaaaacccaaattaagcaaaaaaggggctaaaaagccttaaaatctaacgaccaatgaacctgcttataaagataaataggctatttaacataatataaattataggaagtaatgaatctgtacataaccacatctatactctgcgtgtgctaagtccaatactagacggtatcggacattaaggtggtgttttatcaacttattcatttaattcgtggctgtttcttgagcttagctactccatagcatatattaaaactatcaacttgagatgtaacgataagatgtaaacgatatggaatttgtgaaaccgttagagccaattttgataattgatgatatgcaagatatcagagattatttaaatcaaattttaactggtctgggttttgacgatattttagaaagccgagattttgaatcagcaaaaactgttattgaggaaaagtctccaaatgttatctttctagatattgagcttcctaatacagacggcactgagatccttgaatacttaaatgaccatcacccacatactcatgttgttatgtgttccggccataatagtcttgagaatgtgcaaaatacttgggaacttggtgctaagggttttattgcaaaaccatttaatgccaaaaaagtcgatactgtcatgaagcgcctagaaatgatggaaaccatcgcaagttaagtagtttatgaactcaacaatcaatcttattatagatgacctatctactgttattcttggtaaacaacaacaaattaaacttgctctagcttgtttgtttagcgaaggccatttattaattgaagatttacctgggatgggaaaaaccacattatctcatgcacttgcggcagtcttagggttatcttaccaacgtattcaattcaccagtgatttactaccatcagatatactaggaacaaatatttttgatgcaaaagaacatgcgttttcttttcatcaaggccctgtttttagtcaggttgtgttagcagatgaaataaatcgcgcgggacctaaaacacaaagtgcgttacttgaagccatggaagaaaaacaagttactgttgattcggttaaacatgccctgccttctccattttttgttatcgcaacacaaaatccagtaaatcaatcaggtacttacccgttacctgagtcacaattagatcgttttttcatgcgtattagcttaggctttcctgataaacaagcagaaaaaagcttaattttaggtttgaataaccgcaattatgatgagttaccagttcgcattacccctgagcaacttgctgttattcaaaaagaaatatcttcagttacgttgagtaacgcggttgttgattatattttagaactggttgattacacacgccaaagctctcaatttgttaatcctttatcgccaagagccagtattgctatttcgcgtgctgcgaaatcatgggcttatattgaaggacgagactttgtgttacctgaggatgttcaagctgtatttagcagtgtgactgatcaccgccttggtttgaacaatcaagatagtggctatgcattaaatcatgtgcccgtaagcttataagcatgttaaagcgccctgcttttattatttctgaaattggccaatccattttcaataaatttttgaagaataaacataacgttaatgagatctctctacaacataaaaacatttatgtattaccttctaaattaggcatgcagtttttactcattgcattgcttaactttgtgatgggcatcaattatcaaaacaatctgatcttggcgatggcctatttgatggtagttattttggtgttttcgattctcactggttataagaatatgcgcggtttatctgttaagtatctttttgctttaaatagttatgctcctaaatctccctatgctcgctatcagttacaatcaacctctagtagccaacaagtaaaattaatgatatctggctcagagtcagagactatatcgctggatgactcagacaaaaaaaccattgaaatagcacttaactgtactaaacgtggtgtttacggtcttgaaaaagcaaaaataataagtcactttccatttggtttagtgtctgtgtggagttatattcagccgagtgatgtgatctatgtttaccctactcctaaatcagcagaaaacttagatattgagttacatgaagaactgaacgatgcaggtgataatgctcaatctagaacaggttctgatgagttttatcaattaacaccttttattataggctcagctttgaataaagtatcatggaaacactatgcaaaaacacagcaattgttgagcaaagaatttaccagtgatacgactcaagagttagcgcttaattttaatatgctaagtggtaatacagagtatcgcttaagtcagctatgttttttagttaatcaacttacagaacaacaaatcgctttttcattaactttgccaaaaaagaaaatttcaaaagcgtctggtgatgcccatcaaacagcttgtttaaaagccttagcggagcattagttgtgaatttatcgcttattaatgccgttttatcattcctatttatagcaatcagtggcttattatttagtgagatccctatctcgtttttattcatattagtcggcttaagtttttttaatctcgtgttagaccggttttataaaaaactcactgcactgatggcaaatatccttgcggcactgtgtttaattgcactgtttgtaactgtagggattagcgatacagttaaactgtttgtatctatgatgttactcgctagtacttttaaattgttgcaagctaaagctgtaaaacactatcaaaccgtatgtttactggtattttttaacctttccacggtatatttgttctatcaaggcattttagagaccctgcttgtcagcttgctttacatcattaactttgcggttctgggttatttatcaagccctaaaagcttcaagtctgccaataagcaaagtattaaaacagttttactcgcattaccagtatcggtttttttaattatatttttacctaaactccctgcattttggcaacttccggggccaaagcttgcaaaaactggcttatctgaacaagttgacccttttgcaattgccacgcttgcagagtctgatgaccttgtgttcagagttgaagagcagccgaactcgaccttacaagcgccctattattggcgcagtttaattcatgatgcctttgacggtcagcaatggttagtatcggacattttgaagtctcaacaatttaacgacaatcgtagtgtcaatattgaagaacctaaagttgaatataatgttattgccgagccgtcatcatcgaactggctttttgcgttagggtttgccacgagtagtcataataatgtggcaagcacatacaacggtttactaaaacgtaaaggcaatctaaataaaaatattaaatatgctgtgcaaagtacgcaagtaagttatagcctaactccttttgagcagcggctttatacacaacttcccgttgaaagtaaccccaagactcgtgagcttgtaaataatttagccaataaaaatactaccgcacaatcgtatttcaatgctctattaggctattttaatacgcaacaatttagctataccctaactcctactcctatgcttaataaaaacaccattgatcagtttgtgtttgaaaataagagtgggttttgtggccactacgccagtacagcagcttttatgtttcgtgcggcaggttatccagcacgcgttgtatcaggctacttaggtgcggagcgacaaggcacaacccttaatatttaccaatatgatgcacatgcatgggttgaagtattttacgatgagcgttggcatgttttcgatgcaactgaagttgttgcacctgagcgtctcaacggttcgttgtcagagtttcaagcgttgagcgaacggtttaatgataatttaaactttggcttaaagcgctggagtcacttaaaagcgattaattggcttcgtataaaattagaagagcttgattacaaatggacaaattgggttttaacttttgacgagcaatcgcaacaaaacttatttaaagcgctttttggtaataatgcattttggttaactccattgataatgatggtgactctcgcattttgttttaccagttactttttatacagcaagcgtttacctcgcagttctgaaccacttgtttttgaactgatgcagctttatcgctgggctgaaaaacaacaaattcactacgataaaacaaacactcctttgcaaaatatcgctttgatgaagcgctcaaagccaacagttgccagcaaactagctaaatttgaacaaatattcatcgaagtacgttatcagcaacaggcttttaatcaaaaccgcaaaaagcaggtacgacttctgttaaactccatcaaaacagcaaaatagagaaaaccatgaatgcagtaattattggcgttattttgatgctggtactaacactttgccgaattaacgttattgtcgcaatgacactgagtgcgattgttgctggtctaactgccgggcttggtctatcagaaacactgaatgcatttaatgacgggctctctggtggtgcagaaatcgcattaagctatgccatgttaggggcattcgctgtggctatttcaaaatcaggattgacccgaatacttgcttcaaccctgttaaaacaggtgaatgagcacagccataaaggcgaaacaacgctaagttattttattttagttattatcttactttgcgcgatctcttcgcagaacctaatcccagtgcatattgcctttattcccatattgatcccaccgttgctggtgatattcaacaaactgcgcttagataggcgtgctattgcgtgcattttaacttttggtttggcaacctcgtacatggttttgccctatggttttggtggaatatacctatattcaattttacataaaaacttaaccgataatggtttagaaattgtgaatacccaggtgcccatggcaatgatcatcccagcacttggcatggttgtaggtttgttaatcgcagtgtttattagttataaaaaacgccgtgactatgctccacacccgcttactgaaacacctcaaaatgttgttatcgaacaacctaaaaaagtgcttattgtgggaattgcagctgtgctttgctcgttaatagctcaaagtgttagcaattcgatgatattaggtggactagttggtgtaatgattttcagtttatttggagttgttaagtgggaacaaaatagtgatgtttttagtaaaggcgttgctatgatggcgatgattggctttattatgatttctgcacaagggtttgcttcggtaatgcaagcaacaggtgatgtcacctctcttgttagttcagcagctggccttatggaagggaataaaccacttgctgctgcattaattttacttgttgggttactaataacgatgggcattggtagctcgttttcgacggtgcctataattgccaccttatttgtaccgctggcattagaactaaacttttcagtaatggccactgcggcgcttgttggcactgcaggggcattaggtgatgcaggctcccccgcatcagattctacacttgggccaacatctggtttaaatgctgacgggcaacatgaccatatatgggattctgtggtaccgacatttatccattttaatattccgttgctgatcgccggttggattgcagctatggtattgtaaaaggcccttcggggctttgttactgactaaatagcaccctcaaagccctatttaaatcatgaaaacgaatcggtttagttaatactttgttcattcccgcatctatacagattgctttatcttgatgcgaagcattggctgttaacgctactatgggtaaggtcatctttaattcatcacgaatgtattttgttgcggttataccatccataacgggcatcatcatgtccataagaactaaatcaaagtgttgttgttgtaacttttcaatagcttgttggccatgatcagccaatgtgacatggtgattaagcttttctaagaaagctttaatcaacacttgattggtcttattgtcttcagttaccaaaatagcgataggctctaatgtgttttcttcgtcaactactttggtatcagcacttacaaccgtataggggatctgaatagtaaacttagtacctacattttgttcactaacaactttaatatcccctttcattagatctacaaggctctttgttatgcttaagccaagaccaaccccttcaatctgccggtttacaccataatcatgttgtttaaaggcatcgtaaattgaatcaatatgcgaaggagatattccctgcccagtatctgatatttcaaagtgtaggtattggtcagtgtaatctgctacaaaattaactgtccccactttggtaaacttaaaagcattatcaagaatattaaaaagtatttgccctactcgcgcactatcaatatttattttatccggtaagccgtctttgatttgtgtagaaaaaacaacgttagtgccttgtgttatctctaaaaactgtgatgcaatattcttcaccaaggcattgatgtcggttgctttaatgtctaaatctaatgagccactttcaattttagaaaaatccagtacgtcactaattaaatcaagtaataaatcggcacttgaattagcataatcaagccagcggctttgtttgtcggtaagttttgaatcagcaagcaaatctaacattccgactatcgcattcataggggtacgtatttcatgtgacatcacggttaaaaatttagatttagcaagattcgcttcttctgccttttcttttgctaattgcaaagcttgctcacggtctttgtttactgtgatatcttttgcaattccgaggtagcctctaaactgaccctgcgcatcaaactgtggcttgccactaaatgatacccatgccgatggtgaggagttaacttcaaactcaaaatcaagaaactcagcatgctcggctaaaaggtgcttaaagtgagaccattttttaagatgtttttgttcttgctgagtaatgatcgcatcgaaatttttatgtaaaaaatgacgtttatataaattactgtggctagctgtggtcagcacattaataaaccgctcttctttattggtgcgccaaaaccattcactggcaaagtctctaaataattctgacagctctccaaggcgagttaataacgaggtcgaatgaaatttttgcctatttaaacgtgttaattgtgaatactgccatgctacttgctgtaatagcacatggagcgctgttgatgcttttttagaaaaatagtcactttctttaactgaaaaaaacacaaaacattgcatgctttcttcagacaaggcgactttaaatatcaaggcatcattaagtggctctgagcttaggaaaacatggttagtattaaaaaaacaccattcgtcgttactggattttagtatttcctttagtaattgttcatcaaattcaaggtgttttgtggttctcatttcgaaagatgctttatcatgttcgatattgattaaacaaagttcgttaaaagtaaagtacggcgctaatacatgttcaagctgcgctttcaacgctcgactgtcatttataccgtgaaacttgcgaagttcactctgtaactgttgtaaatttaattcagccattgcttttccacgttgatattgcgtcgcatattgcaaataaatgccccacttttagtgtagacactaaacctagaaaataaagtatttaaatttcattaccttataaaactttaccttttggtacagactatgcttttaagtagtattgaacgaataaggggtaagaatcatgaaaatagtatgcattggtggtggccatggtttatctcatatgctcagtgctataagacctcattgtgcagaactaactgcgattgttgcaacaaccgataatggtggtagcactggcaagctaagaaatagtcaagatgttgttgcattgggtgacatacggcgctgttgtttacagcttgcagataacgactcacttattcatcaagtatttcaccaccggtttaatggcggtgaactcgatggccacagcttaggtaatttagcattattaagtttaacgcagcaaacaaactctgcgactcaagcggtagcatggtttaacgcaatgttaggaaactctgaaactattttacccatgtcagatgaacctaccgatttacttgcggtgttaccttctggtttaaaagtatttggcgaatgcgaaattgattctctggctgaattacccgattacgtcaccctttctcaaaatgtaaatgccgcaccaggtgttattcaagcaatagaaaacgcagatatgcttattattggcccaggcagtctgattaccagtgttatgccagccatgttagtagaagatattgccaaagccgtacaaaacacatctgcatgtagagtgtttattgaaaacatcgctaaagaaaccagtgttattaaatcgctcgatatgaaacctgttgactggcttgaaggcatgctgggctatagtttttgcgatttaagtatttctttagatgcacttagtgaaattgtttcgcattttaatgatgtggtgaaatcggctaatcaacaacacgatatagagcagttaagtacggtgtttggggaaatcctaaaaatgccgctcagtttagagactgagcatgagcaattaattcgcgctgatcaagctctgcgcgtgggttgaggtctgtgtaaattgatcttgcaacgtactgattaggctaacaagttggtcatcgaattgttctgctttagctttcatttcaatttgttcggcaagttttccgacagctaatgcaccatagctcaggctactgctttttaagctatgcgcattaatttcgatgtcagtttgcttgtttggatcagctaggcttgaaacaatttgactggattcagtgatatagacttgcaaaagctgtttagctaagtcatcaccaacatcctgttttaactgagaaaatgtagcattatctatcatggtctcaccttggagtgaatatgaaatacagtgttattttatttgttgattcaagcctgataggtggaatcgaaagtcacctaattgctttaaataagcttttagaacgaaacaatattaagagttcaatcctattttatcaagatcataataatcgggatttttactatcgcttagagcaagaaaatatcgtctatggttttgctggcgggagcttaaaaagtttaaacgatattttaaaatcgtttcctcgttcagcgttactgcacacccatgggtacaaggcaagtatcatgggtaagttagtatgccgctggcaaaaccgcccttgcatttcgacttaccatgctggagaagttggccgtggtaaagtctttttatataacaagcttgataagcttttaagcttcttttctaaaaactttgcagtttcaaatcaattagctgccgatatttacaatgccgaagtgcttgaaaacttcatttctattcctaatgctaacccgacattagaacctaaatgcaaaagcaatttaaatgttggttttgttggtcggctttcaatagaaaaagcgcccgatatatttgtagatgttgctaagcaatttgctactagttctttaatttttcatatgtttggcgatggacctatgcgtgacgaacttgagctttcttcagtatcctttcacggcatgtgcgaccaacatgaaatttggcaaaaactcgatgtattagtggtctgttctagggctgaaggactgccaatggtagtgcttgaggcaatgtcgcatggcgtattagttattgtctctcctgttgggcaattacctcatattgtgagtcacttaaccaatgggttattaatggcagacaattctgcgcaagcgctatctaagcaattaaataatttaatcaatttaacccctgaccaaattacttacatgcttactaatgcgcatactttggtcaggcaacggtttggtggagagcaacaattcaagcaacttaaccgagtttatcggactagcttacttgcatctcttcccagcttttaatttttcggtataaagttgaagggctcacatctaataaagcagctgctttaggaatgttgttatcacatgcttgtatagcttgttcaatgtaacgtttttcaacaagccataatggttcaatgtctgcttgagtgaacggcaacaaagtgtcattcatggtagcttgttcagtatgcaagcctgtatctacagcagtaataatgacttctggttgcggtacttgatgcaacgatgctaattgattctgattagaggattgaggtaatgcggggatcatatccacttcgatatatgattcatcatgtaacaccataatattacgaatcgtgttctctaattgacgaacattaccaggccaactgtagcccaaaaataagttttttacgccttcagacatccctttatattgacgcttttcttctttacttatttttttaaataacgcatcagcaatttctataacatctttgccccgttgttttagtggcggtaaggctattggaataacgtgtaaacgataatagagatcttcccgaaagcgaccttcttgtacttctagtaacgggtctcgattggtagcgcaaacgaagcgtacatccacttttacttctttttcactgcctacttgttgataacatcccgtttgaataaaacgcagtagtttgctttgtaagttgatatccatctcacaaagttcatcaagaaataacgtgccgccatcagcttgacctgcggctccttctcgatttgctatagcaccagtaaaagcgccttttaagtgtccgaatatttcgctttcaattaagtctttaggaatagctgcacagtttagagcaacaaaaggcttattagctcgaggtgatgctaaatgcacagcacgtgcacacaactctttaccagtaccactttcaccggtgatgaacacggttgctttacttgccgatgcagattttatgatttgataaactgactgcatcacgcttgagctaccaatcaaatcaaaatatttaccattttcgtatgtagtttgataactttttaccgtttgctttaagtcttttaatttaagcgcgttatttacggtgatcctaaaacgatcggcttctattggtttttctaaaaagtcactcgcgccgagtttaatggctttaatggccatttctttggtgccatgacctgtaagaacaataacttgtggtgcggtgtctgagtctaacgaagataaaatatccaagccatttatatcgggtagcatgacatctaaaattattaagtcaggctcgaattcttgtaatgcacacattgcttgctcaccgttataagcgatgcgtgttttcactcccgttggaatcagataagactgatacatcaaggcgagtgactcagtatcttcaacaatgagtattttaggtggcattactggcttcctttttatagtttttatgctgagataaagtgattattttacagttccttactagtagcttagtgcttaattggtgactttgtaaactctatatttagtgtttattgatgacaattaaagacgcatcatcaacttcgtctgatagtttaacttggcttgattgccaaagcttatatgcaaattgttcactgtgaagatcttcggccgttaaatttgctatgtgttgacccacctcattaaaatgttggttgtctaaccagccatcagtaaatagtaaaatatgctcaacatcactcaggtcatattggtaatgtgagtagtgatgctcatcacttaaaccaagtaaagggtctgttccagttaactgtattaactgcccttttttagtaataacacaaggagcaggatgaccggcattgaaccaatggaatgtgttgttttctataaatgttattaataaggtcactaaactcgatttacacagtcgttgttcacagagtgctgtgtttaaggtgctaagaacattttgtaaggggatctctgtggccaaacagccactcaaaaaacctttgatggcgaagctttcttttaaagctgtaatgccatgccccatcatatctcctaagataactggcttttgtggctggtggggatataaacagaaatcgccaccattttgtgaaataatcgagccaaaattataagcggtatgatctgttaaactacgctgtgtttgcattcgctcttcgttaattaaatattttaacgcagagaatcgatgaacaattcgttcaatactttgtagtaatcgagtttttgttacgggttttactaagtagtcatcaacccctaataaatttatccgtttaataagttcatcactatcatctccggttagcatgactactgataaatttgttttaatatttgactgatttaatttttttaataatggctcacttgtgccattttttagtttatggtcaagcaacaaaatcgttgcgcccgatgtaagtagctcttgccaacctgactctatatcttcacagcaaattacctgaaagtggttgcaaagataagcatttagcaaagctaactgagatttgtcatcatcgatataaatcagtgttggtcgtttatcaatgtttgataaatgaaatgaaaaggtatttttgtgcttctctgatgtgtacttagcatttgggaagtagtgcttaataagcgctacacccataccaccttctactaactcaccactttctagatgccaatcagagctatgattctcaaacaaattatagcttggcattgcatcagtgaactctataagcaatttatttttaggtaatttatacattgaaaactgcagctttttatcactttcctcgctatgacgtagcaagtttgttaggtactcagtagcaaccaagccggcagcatcaatatcttgatttttaacacttatagctgttaatacatgttttagaatatggcggatctcactaacaataggccaatctaattgaaatgatttttgatataaacaatccatacaaggcctcagtaaggaacaaataaccaacgttgtttgatcactttattaattaaaaaattagtgagtgttggccacttttgttggtatttattgagtgtatttaaaatacgactaccaagcggtgcaaactgatgttgagcaacaacaatttttatattttttatccccgcattgtttaaatttgcgaccccgtgacacagcgcctcttcattgttgtaaccaagtgatactgtcaaaaaggttaattcagtacacagacttaatgcatgcagcggcacattacctcggttacgtttcaaggccgggctcatatctaaaaaaataaaatcgtactcttgctttattcgttcaatcgcatcattgagtactgttttattttttaccgattccagctcttttaggtgctgcatggttaataaatcaacataatcagtattaataatattaagctgacaagatatatcactaaaacaccatgattctgcttttgtttgcgcatccaatttaaaagggtttaaagggttcaagtcgataattagtactcttgaaccttgtaaacttaaacgtctagcaacacttgcacacaatgacgttgacccttcattgcctgttaaagaaataaaacaaatgcaacgtgctttagcattatctatttcgttacacacagcttctagttcttggtattgcgcaggaattaatttcataagcccaccactaaagctagcacagtaataaaatctaagaagtttgatttaaattgactcattaaatcttgccctttatcagggacataaagtgtatcgcccgctcgtagaaccggtatgtaagctgagttagggtttttcacaaactcttctaaatcaaatactcttgattgctctttgcagcaagagtggttcacaaccacgattttgtcgatgagtgctgaacttgatggaccgcctgcttctgctaaaacatcaagcactgtcatggtatcgtcaaagctatagcgtcctggtttttcaactgcgcccatgattcgaacaacttgctctttaggtgtacgtaaccagtctttgtttttttctgggatataaatggtgtcgccaggtaacacatggggaaataatgtttcatcgccggtttcaaaatacattgcaaggtttaacctgctaactttagccgtattaccattacggtgagtaatacgaatattacgtaggtctgcattatcggtcggaccatcagctgcagccaaaatatcaataaagtgcatgttggtattaaaagcatatcgacctggtgaaccaacctgccccataatataaattgattttccagactcttggcggatccattgagatttattgtctgcagggtcaaccggtaactcttcaacaataatggtgtcgccagccattaaatttggcagttcatatttgcccgaatcattaatagtgtattgctctaaatcgaaacgtttggtcacctcgccgtttctcacaattttaatatcattgatattggcacccttagttgggccgccggcatgagcaagtaaatcagtaaagtccatttcagggctccactcataacggcccggagataaaatggcaccgataattttgatggcacgttttgggggtacttttaaccagcttttttcgttttgatcggttttctctggtacaaaaatcacatcgcctgggttaaggcttggtacttttactgtgactatgccttcgctgtaaccttgtaagtcaaataagatgctttcgcctgctggagttaagattttaatctgacgagtttcagcaaagcgtgttggccccccagcattagcaagaatatctaaaaagcttgtattttctgcggcttcataggcaccaggcttttgtacctctcccatgatgtacacggttcttgatgtggtattcacatcatcgaccataattggtacatagatagtagagcccgctttgagctctggcatggtatcgttgcttggtttatctaagtatgcttttagatcaaataccactggggttttatcaacaatgacgcgaattttagttacatcagcatagcgagttacgccttctgcacgcattaatgcatctagcacactcatattttctttaaaagagaaactacccgggttgtgcacttcacccaataaagtaatcgcactgttatcgctcgcatcgccagaagcacttaatgtttgagcatcaaaatcaatttgtacattacctaatagcggagaaacaggcacaaatacagtatcagcgctttgtaagctgggtagtaaatctatgttgcctgagtctagatacgctttatagttgaactctataacttcatttgcacggcgaatttgtaagcggtctagttgggcgccgggttttaagcccccagctctggctattaccatttgaatgttaccgtcgtttggaatactaacttgtgaaggttcattcacataacccattacattaataaagatatcgcgcgaatgtatttctacataaaaatcatccattgcaacaaagacttcactgagtgattttttgagctgtgcttcaatttctttaagttctaagcctgccacattaaaacgacccagctcaggcagtgtgatagagccatctttatctacctcaaatggttgagaaaaatcagcttcaccaggtaaatagacgaaaagcttattgcccactttgatttcttcagcagccactgtggttgcaagaaaaattaaacaaagtaataaaagtaattgtttcatggtattactccttaggcccgtttaagattttcgtccaactagataatgcaggatgttgctcatttactttttcgtcacccttgtcgataataatcgcgtttacacgtctatctgaatggcgcttaaaactcgaatcaggttgttcgctgtaaggcgataaacttccttgcgttaaggtggtcatagttgcagggtttacaccataaacacccagccaatgtttcactgtttcggcgcgtttaagagccagttcataatttgttatttgctgaccactaatatcagcatgaccgacaatcaataactcaacatttttcacttgtttaattagatcagcagcttgtgctaagcgtgagagatacttcggcgttacctgaaagtcgtttaacgaaaattgattatcgctattcaaaagctctgtgatctgttcttttagagaaacactcattggctcttctgcttttgttgctgcaccgcatttagtcaatgcattaaccgtctcgaagtgtttagttagttgatttagtccatggtaatgaacgagtaaatcatgctcggcatcagcccacattttagccgcaatgagtcgacgaatgcggttttcatatatctgtgcttttaataattgagcaggcatacattgttgaataccttgtgcttttagtaaatcaagtttgaatacatgatgttcaaactcactaagtacaatggtttcctgtgtatcgtaaataagctcgttttgcttatcggttaacgggtagttctgatatttttcagcccagccgccttgcccttcatcaggccaagaagcacatccacctaacgtgagcaaaattatgataaagagtgtgtgcttcataactcacctcaagctatatcattttgttcaatgaaagggattgttttgtctactcttaacagactcattaacttatgaggctgaccagagacattaagtaatgacagcttttggcctttcttctcaatgcgtttatataaaaagaccatcgcacctatacctgatgagtcgataaaagttgtttcactaaaatcgagtacaacgttggtttgtttaccttgtgctacttcttcaaattgatctttaaagccgtctactgcaaggcccgaaaaatcatttgggagtgtgatgtatttactgtctacagatacttttgtgttgttagccatgatcttctacctttgtatttggttagtcatagttaacagtacaactacagtgccagtttataacgcattgatttatatattaataaagactgattgatgcataatgcaaacttttttgatagtaaaaattgcattatgcaacgtaatttgcggaacctgttattgtcctttaccagtgaaaacaacaagtaaggttcgcaggataattgataattctaattttgcccatgcaacaggagaagacatactcaatgaataagcgtaatcccaacctatcttacttctggcgtcttctattgtttcgtcgtatccgttcattacttgtgcaagacctgagatacccggtttcaccccgtaagtacgttgacaaaaatagggaatatctttttccagtttgctgtagaaaactgggcgttcaggtcgagggcctattaaagacatctctcctttaagaacattaaaaagttgcggaagctcgtcgatacgggttttacgcataaaacggccaaccgctgttattcttggatcatctttacttgcccaaacagcacctgagtgtgactcagcatcaacaaccatagagcgaaatttataaacgtaaaaaagcgacacaaattcatctgagctttcgcccactctcaactgtttaaatatcactgggccttttgaggttagttttattacaacagcagttattaagcagattggccatacaagagtgagaagtgctagcgcgccaacaatatcaattgtgcgttttattgttttaactagcgttttggttgaggccttacgaattgacctaacccgtttccaaggtttgttaaagtagccaagttcgtagcgaataattccccacaatgctaagaagtagctatttaatatatagttgctcttatcaatcaaaggtataggtgttgtaatttggcaagttgctttgactatatgtgtaatgtgtaaagacgctatagctgttgcaagagcttgtgcccacaatgtgtgtgcaaaaaatgcctcaaaaataatgctggcatagataaaggctaaaataataggcataacaccacgcagaactttatgagaaaaataattaaggaatgtccaacctaaacgaggatttaacaaaatcattaaggctttaatttgttgccaatttccggcgcctaaacgtacgcggcgggtgtaatcatcgctttgtgaatcgcaatcacgttcgtatatcacaacgtcttcgtcaagtaccgccttgccccctttgcccaatactttcattgataaaacaaaatcgtcatttatggtgttttgttcaagttcaaacgcatcgcttgagcgcatagcgaacatagcaccagggacaccaataacagcaccaaggttcgattctgatttcttaatttgattttggtaatgccaataaaccttttgtgactcaggtgcatcgtcatccaatgtgtacacaccggttaaaatactgatagagggattaacaaaatgctctacaactttattaagcacatcaatgcttaataaggcactgacatcggtaaaaagtagaatatcgttttgatattttgcaatgcccatcagggtatttaagccttgtactttccccatattctcatcgcgaatatgaaaaaagcactgtactccttggctatgaagcacttgttgagcttgcattgcctgttctatcgtgttgtctgtacagccatcaaaataaacatggattgaatagcgactgttatcataaattaatgaggctaggttatggagcttctcagcaatgtactgctgttcattgtaagcgcacattaaaatcgcaatttttggttgatacttatcagcacactcttgctgtgtagttggttttaactttcttgaggcaatcagttttaacaaaattgggtaaccaatatggtgatatataacaacacacaccaaggtaataaatagaagcgtaataaatgtcatactaacctcctacatcagcagtgctgagtataaattatcgtatttactgctcattgttcgtgcatcagcaaccttaatagcatggtgacggatacatagtccccgcggtaaagtgcaggctctttgaattgcaggagcaagttgattaaagtcattaacactgacaagttcaccttgctctggagtaacgacttcatgaatgcctcccacatcactggccacaattggaataccacatgccattgcttcaattattgaaagtggaaggccttcgcgttgagagtacaagcacatcacatcaatacttgaataaaatgcacgcatatcatgtacatttcccaaaaaatgaacccgtgaagttaagtgcaagcttcttaccaaatttaataaatactctttttggtctccatctcctgcaaataccatatgaaaatcatcgggtaagtagcgaagtgaatgaatcatatctttatgacccttcccttctatgagtcttgctgcgcagccgattaacttaacattattgggtaagttgaattgttcacgagctgctttagcatcaatagccataaagttttcgcaatctatgccatttaaaatagtgcgctcggggataatcgcagttttggctctaaattcgtctgcaacaatgcgtgcgtcagcaacccaatatatattagttaacgaatctaataactttgtaaaagtacgttgttttgtattagtgaggtaccatgcgtcatgtattgttgaaatatgccgtactgaaccttgcgataacgaacttgctatccccgcataaatcagtggcccaatgtggtggctatgtattatgtcaatatcatgctctttgattagacttttgattttagctataacagataaactgatccctggctttttatctaaacaaatgacgcgatgactgaagggctcaagctcaggccactgttcaaatgcagtatttctatccccctcaagcgaaacaataatacttgaatgcttaaattgactgttttgaagcagcgttattgccattttttctaagccacctacctgtaagtgttgaactaaatgcataacattcatgatttttctccttcaataatgccggttatttccccgttattgacgataggaagtattgttaccacctcagtgttagttaacttttcaatggtttgcgtgtcttttaaatggctatcacaaagggctgcaacaaacacacttgcaccacctgtaaatattcctaagataagacctacaattgcagtcatcataattgaggtatttattggttgcgttgggctatatgcgcgttcaattgtcttaactttgtcagggccttcatatttaacaagcttgccggtcactttggccatttcgtaacgactgagcatatctttgtatagtgattgttttacttcatagtcacgctcgagtttacgtaattgcttttcaacatcactggtcactaataaacgatcgctcactagcttcacttgctcttctaacatggcaaactcttgctcttgctgtagtaagttgttgcgtgcctcttcaagtgctaacagttgagaaaccagtacacttgattctttgttatcttgagaaggtaaggtattcactaactgccaaagctgatcgatatttgttgtacttaactgttcgcttttctctagtaatgcttgttgacggctttttaaattaacgagggtacgttttttctcgatgattttgctgtgcttatcggtatagcgagtgcgcagcaaactgagttctgattctgtacggattattttttcttctaagtttcctaaaataggatttgcttgccctactttacttaccagtgcgttaagctttgcttttgcaccagatagagcaatcattttttgttgtttttcacttagtaaggtatcaaatgtttgccggttactatgaagcacggctggtaaagtattactgttttgacttttaaattctgctagtgcttcttctgaagcctctaattcttcacgtagactatcaagttgtatgtagaaaaattgctcagacgtatccagagaagctttagttggagcaagtaaacgctctataaatttttcaacgaccttttcaagcacgggtttcatttgtgcttggttatgccaaataaagttgatgcggaccagctcatcaccaatcaaagataaagataaagccttagacaactgttgatgtatttcttcaacctgtttattgctggcattttcagggattaattgtgtttctttcgctacagagataagtactttgcgactgataactaaggtgcgtaacgctgcaatacgatctgataattgaaatgagaaagataagtcatctaaatatgggttaagtagtgcagattcttcgattaaaatagttgcatgattgctgtattgtttttgtgcaaataaagcaagcacaatcacgacgagtggcacaatacaaaacgggattataaaaagcttaatacgcgtgtatagcgcataaagccctaaatatagtaaccgtttgatttgctcttttactaacatgatttacctattgctttgcattttgcaaaatgtttgggttattgattgcaaattgaaaataaataaccctgatacattcatttaattagtaagttgcaggtctcgagccaaaatgcaaaaagctgcatgttgtagctatacaagatgcagcttttaggttttacgattaaatcagcaaaatcttagttgtttacaaactaacgtggcttttgcttgccaactatgattattagcttgctgagattgattagttcgccagtttaagttttgtgatttacttaagctaactgcatagtcaattcgatcgataaaaccttgatgggtgtctgctattaagatggtctcacgataaggattaaccgcagcaaagcgtgttgtgacgattggtgtgcctgtggctatgtattcttttaacttgagtggatcacaagatcttatctgctcattatcaacaaacggtaagatcgatacttgccaatgctgtgaaaatgaagctaagcgatgatgctctacagcctttatatgggttacattgtccaacttgagtagctcagagaaatcttctatgaggtgtcctattaaaactaattgatactcaggcctctctttagcaagagtcaacaataaggctttatcaagccaagcatttaaggagccataaaaaccaataattggtttgcttatttgctcaagttctctggcttttgctgtttgcgtagtaaaaagcgctaaatcaaccccatgagaaagcattttcactttggattttggcattttgttggcaagtcgctcgctaacaacatagatagtatctgcttttttgataagttgactttcaaatggcgcaaccattttatgatcaacaccagccagtgctgagaagtcatcaccacaatagtaaattactttatcttgctctcttggagagattaaactaattgctgttggcacacttaaccaatagacaattggctcctcacctatgaaaccttttttattaaaaatccacttattatataaccttacaataagattatcgtgccaaggtaaaacagctaatgtgtgcgctgttaaatctaaattgtggctatgatcagttgttttagcatttgggcttgagcgctttgataaaaaaaggctttttaatttattaaaaactcgtttcacatcaatcaagcgaaatgttggtttgcgcatcccaatcgagttaatccaaataacctgatgctgttttgctagttgtttgaatagatgctgtgtactacttgggtgactttgccagtcttcgccgaatacaataaatttcatagcgaatccttaagctgtttaacaacttttgctggattaccggcaacgatagtgtttgcaggtacatctttagttacgacagcgcttgctgcaacaatagccccttcaccgattgttactcctgcaagtacagttgcaccagtaccaatccaagcgccttgtttaatgatgatatcgcctacttggcactcatcatcaggctcaccctttgcacgtctttgtgaatttaatgggtgaccaggaaacccagctaaaaacaccctaccagcaagacgcacatcgtcctctagaatgatattacgccccactgaaaatgcgttttgccagccaatatcaacattactgccaattataagcttaggtgtaaattcgccctgactccgcccagaaaatgttgtaataccgctaatgcgcgtattatctttacaactaatttcgagtttgcctaatatttgtggcattcctgaataaagatataaattagctttagtgcctttaatttggcttttaaataacggtgtgtaataaaagatacgtgccatctcgctaatcgttgtgctaataagtaaatgcagtttaaacagcaaggaatgtacacccgggatcacccaaatttgcggattgcgaatagcttttgcaaattgaaaaagtgattttgcaaatgggctgtcacttgattttaaccaatgtttaagttgttcactcatgtgcgttctcccattgtctatccattaccagcttttctaaggcaattgttaaagcaaggattatataaataggccatgtaaatgcttgagttaaaaatgttccagacaccataaagccaattaatccgccttttaacgctttcgcatttaccgctattttttcatcatttaactgcgtatttatcaaaaatactcggtttaaactgcggtaaatacaggcaatcactaatatgaaaatgcatatgccaacaatgcctgtttcacctaaaacttgaaaccatgtactgtgtactgcatgattcttgccatcccaatgggggctgtaaaaatagtaattaacaacaaaattattaacgccaacccccgttagtgggttatgaatcgccatattgatcgctgcttgccatgcatagatacggcccatagcagattcatcaactccgccttcatgtgaaccaccactttgcctatcagcaataccagcaaacgccaccatagcaagcattccaacagcaccaatacaagctacaactacggggttcttaactttttgataaataaagaagctaatcactgctgcaataccgagtagtccgcctcgactttgagtcgcaataacgccgctaatagcaatcactaagcaaattaatgcaattattcgtctgactttatgcgcacttgtatcaaacacttctgctgctaaaaacgacacagggaacatcattaccagtgacaagtcattgggatcgcctaattgcgaacgcagttcacgtgagattgtcacgcgtgtcccttcaactaaaccaatcccattcattttgttactcagtgccactaaggctatggcagcaccagaaatcatgatgccaactctgactgcattaaaatgtttaagtgatgtcatccaccaagaaattgcaaagaccattatgagcactttagttaaaacgccactccagtactccatcgcaagtccacgattagacgcactgaatacacacacggtgagccagacaaaccataaaaagaacacaaggtgacttgtttgccagtgaggcttaagtttttgagaaatgaaaaggtgccaaacaataccaagcaacgatgcaagtgctagcagctttggtattttaaaaggcattaatattggaaatgcctcatggagtctaaagtaactaaacaggatgaataatataataaatgcaacactgacttttaccgcagtgaaggcagcgaatggcaggagcaacaaagcaaatacagctattggccctaccgttgcgtatgtcactgctacagcaaaagtaattaaaatgccattaattaaaagcgtgttttgtttatagtaattgagcataatcatgccccttaactagctttttaatggcaggtaaaaatagtgacttatattggaaggctaatccggtaatgtaaaagacaagaataagccctttagctgttagtgaactttcaaattgcagtgttacaaaggttattgatactaatgcaagccaacttgggataacagcaaaaaaatctagctgcaaaggctcaagatgttgactcaaaatgtaaaaacatactaatttaaagctttgcatgatagctaaagcggctatgacgccttcaactgcaaaacgtggtaccaagaaatacagtaaagttaatcctaaacatgcagttagcaaattaacaacagatacatacacaccatttttatgcatgtaacaaccaatatttaaaatgtcactgtgatgtctgatagcaacaactaatattagcaacacgagccattcgtcatgcccatgatagtgagctggtaatacaaaattaagtaataaaggcgcaataatggccattataacgcacaatacaagacccgtattcagagacaaaatagcatactgttgatactgtaatttgtttgttttgataaggttaaagcgtttagcaaaccaccatagtctaattggctcaaaggtgaatgaggttataattgcaaactgagccgaaacataataattagctaacaatttttcatcgaagtaagcaacaatgaaccaattttctgcaccattacctgcataaacaaacaaccccgatgaaattatagaaagtaaaaacacaccctgagattttttgattcgccaactaaactctgcgtagctaacttttattgcatcagcaatatcataaacagtgaatgctaaaataattagggtgcacacaactcctgaaaccatcacgccggtgatattatagccaagcactaataaagtaattgttaaacacgtttgaatcagagcatgagaaacgctgtaaaaacaatacttttgcgcatgatcaaatagtcgataataggtataaggaatacttaatatggctgctagcgcaagatttattattaataacttgagatctatcagcttgatattggcgggtaatgctttgatgatatcttctgaaaaaacaaatccaaaaagaatgaacattagacagaataatagaattaagattaaagcgtcacgaaacaatgccattttttctttaaaagaatcatattgttgctttagcaataactcaggtaaccctaatgaaacgaccagagaacataatgcagacagtgttactagaaagtttaattgaccaaactcctgttgttctaaaaggcgagttgtaatgggtaaaagtattaaacccattccttttaccgcaaagattgcacatgcaaagtagcctatttgctttaagttactcatggtcgttccttataaagattcaacccattgtgataaccgttctgcctgttttattgcgttatagtttagatttacatgctgtttagcattttgacctagcatataacgctgatgaggagagagttggtggaatttaaatagcattttgctaatagcagaaatgctcccaggcatgcatttcattccaacttggggtgtgacaatttcgtttgcccccattaatgtggtggtgagtacaggtaaaccagaggccatggcttcttttaacactaacgggcctgtatccctatcaccgttttcagcaatacaaaaaggtgcgataagagctgaatagtaaattaggttttcgctgacccaatcatgtggtttttcacctaaaaaccggacagactttcttattcctaactcttcagccataaagattaaatcgttcaacatagggccatcaccaacaatatcaacagtgatcccaagctctttcggaatttgcctcaaagctggtaataaaaactgcaacccttttttttcgactaaccgccctataaaaattagccggacggactcattaagtgatgtggggctatgattaaattgactggtatcgataccacaatgcagcaacttaacgttactgtcagaaaagcgcttaaattgcatagccatttcttcacagacagctatcgaaaaatcacaaaatgcgagtttaggttttagatcagcactgtttacataaacatcatgtccgtggccaattgatgatactgtaatgtctgcaagtttcgctgcaacaatgccataagccagtggcccatgcataaaatggcaatgtagatgatcaatctttgcagcttttatataacgtgcaatttgataaccataagcaagcaaggattgtgttgaaattgatttaaattgagctgcagtgtgagctgcttttgctaacttataaatgttaaacatagaaggtaagatcaatttaaacgctggtttagtgatttttttaacttcaatggtactggttaaattaatcaacacactggttttttcgaaggttaacaccgtcaccttgtgccctgcgtttaacagcgctttaatttctgttacaacaaaggtttctgatgcaatcggaaagcttgggactaatatagcaatgtgcttcataaaaaacgctcctacaaaaacggttataagagctatggcaagttccatacccgacaaaaaagccgctaaattcccgaaatgagataaaaacatgcttagcatttgcaaaatgcaacgcacaaagagaaaagacttagtaatttaacagaaaatacagatttaaagctggcgtctaaattgcgtatcctttactacgtgaagaaatgcttttggagcatattatgaacagccaagtcagtattatcattccaaactacaactgcttacagtatttagatacttgtattaacagcatttatcagcaaaaaaatgttcagttcgagatcattattgtcgatgatggctccactgatggcagtatcaactacctacaacaactcgccgctgaaaaaaatgaagtacggatttttagtcaacaacgaaaaggcgttgttgctgctcgtaaccttgcaataacacaagcaaagtcagagtacttagcttttttagatgccgatgattattggtctgctgataagcttgctagtcaacttgaattccatctaaaacatcctgattgtgtgttaagttttactgactatatgcattttaatgaacagaacgaggacattattggttgtttcgactattggcctgaatttaaatgcaataaagaaagtaaagatttccaattacttgaaaacccaatcagccaaatgatcaccaccaatattgttggtacatcatcagtaatggttaaacgttcagccattgttgatgtgggtggttttgacaataagttaagtagcgctaccgatttagattgctggttaaaattagctaaacgcggtgatgtagcctactcaatacagtgtgcaatgcactatttaatgcgcgccaattctattacagcaaacagagaaaaccgtttagcggccatggtcgaaataattaatcgtaaccaatctgttgtatcaaacaatgaacttaaaaaaatcaaagcgcgattaagtgaatgctatggtgaattttatagggagcttggttactactcaaaggcattagcctactcttacaaagcgttttggttatttccacataaacgaaattttaaacatgttttgtatgatttaaggcatttacttggggctcaatcatgaaaacaaccattttaatcattgatgatgatgaagcgatattacgtgccctatcgcgtttactatcacaagaccatgttgttgtatgctttagtgacccatgtgcagcgatcaaatatacaaaattaaataatgtaaacttagttatatgtgatttactaatgccaacgttaaacggtttaactgtacttaaagaaattcgcctgatccaaccacattgctcgcgaatgctacttacaggttatgctgagttagaagcaactaagcatgcgatatataaaaacatcgccaatatcatcacagccaaaccatgggataattttgagttaacaatggtaatcaatcttttgatagaaaatagctttctacgcgctaatcaatatgtcgaaaaagaaagttgatagcttagtaaatggtgatcactacctttgatgacttgcgtgtgtactccagaaagtcgcgttccttggcttacaatacaattatcaattggtaaacccgctaacgaaatagccaatttattttcaacaacagaccaacttgcatagttacgaccttgctgagaacaactgttgttatgatttaaaaaataacgtgaccaaggcacagtattaaaatccccggctataaaccaatgcccttttaattgaagcatttgtttatcaacttgcgataaaagataatttctttgctcccataaaagctgatttctgggtgatggcggatgcagtaaaattgcgctcacgactgtatctttgaacaaaaagttaagttttacaaaacctagttttgggttatctaaatacttaatttgtttctggataattggatgttttgagataacaataattccaaatggcgccccttcaacttcagcatagccaaataaatgataacgtcctttaagttcactaagcaggtgacgctgtgtatcattaaattcaaacaaaatgagtatatcgttgtcgctattaactagctgagtattaattatgtcggttaagtatggattactataatggacgtttgcttgtgctatttttatatcacctgcttgagagtcagcttgattaaaataattgtaatgatgaaagatcagtaccgtactgaataccacgcaaacagcgcccaattttttagccttctgaacacaagccattgcaaacagcaagctaaacgcaagcatttgccctcttaatgaggcgataagatcaaaccaatagttatcaacttggttaaaagccaatataagtatgcaactgtataaagtaaaaagtatgaaattcatcgactcccccttgctgaatttatagttgcataattcattccttgctgagcttttatttaccccaaatattgtatgatgtgttctttatcatataaataataagtacccataggtacttattacattaaaaatatttgtcgattagttaatcgaaaccgttgatcattttttcgcaaacaaccggtgttggtctatggttatcatcaacagctacaaaggtaaagctgccagaaatagccaagtgcttatcatctttatgcattctttctaagaaaatctcaacgtctactttaaggctggtattacctacatgtacaacttttgaaataagctcagcaaatgttcctgcaggaatagcttctttaaaatccacacggtcagacgaaatcgttacaagtggctttctacaaaaacgcgtagcagcaataaaagccacttcatccatccaagcaagtgcatcaccaccaaataaagtattatggtgattagtacggccaggaaaaacagtttttgttactgatgttgttgaatcagcaatacgctttgcaataatagcgtcacgatcgatttgttgtgtcatagtctctacttttcattagctaatgtgtcttgcatcattagcacagggtcaaggcgttcattcttccaattaaaacgccagtctaaatgagggccagttacgcgaccagtcgcgccaatttcagcaattttatcgccacgcttaatttcatcccctattttgacatctaatttacttaaatgaatgtaagtagaggtaacgccatggccatgatcaagaattaacgtgccacctgagtaatataaatctgcatcagcaaataccacagtgccacttacaggcgcatacactggagtgcctgttttatttgcaatgtctaaaccaaaatgcggtctgcgtggctcaccattaaagtatcgctggctaccataaacacctgagatacgcccagttgcaggtttataaactgggtctaaaaagtatcttaagtcagaatcaacttgcctagctttacgcacagcaactgcttcacggctaatacgctcagacacttctttaggtggcgaaacatatttttttgcaacaccagttattttatcaattttatagttacgcttggtgattgtaattgcttgctcgtggctcacaccattactatcaacccaagaaagattgtgatttgtctcagcatcacgaccaaaaccaaatacaaactcaccattttttgaaagcttaagtttctcgccattaaaactaacgcttttaacaccttcaatttgacctgttactaaaccaccttgggttaaatgtccttttaattcaacagcacttgcagtaagtgagaacagccctgcaaacgctgctactagtaatcctttacgcataactgattgaccctttgccaacaccttcataagcagtaatttttacctctgattcagggtattggtttttaacttgagaacttaagtagtctgcaatgcattcaacagtggtatcgcaaggtaaaatgtcgcagcgagacttatcaattgccatttcaaaatagccttgctgtgatgtatacgcaaaacacacatcgttgtcttgtgcagttacatgtttaaggtctgctttgttaatttcatcttcagcagtggctaaataaatgtcttcccatttatctgcccattctttttgtaagcgtggcatagccataccatcaaggctaataccaatttgcgaacggtgaccatgaataatacgctggcaattaccatcatgctttttaaggccatggctgtaatgatagtaaaagctttggctatgctctgggtataaattgatttcgatcttttcgatgttactaggtagctcaggcattatcgttttaatcaaaaactcagttactgatttttcgtcaacaacatccgcatcaattaagcaaaatgcttggttaggagcactcatagctaagtgataattatcaccaaaatggcaatctagcacgctatgctcagcatgctctgttagtgaaccgtttaatttggcaggcacagcaagtttgtggtcgatacagttatcaataatgcccttgatttgctttttaactaagccaaaatcaagcaccatcgactcatcatttaattggccatgcagagttaaatccacaatccagctctcgccaactgcgccgcgtttattacacaagtaagaaaaatcaatcactgtcagtgagtttacaaaaaggatcataaatttcctttagactggttaaagaatcacagcaattataatgatttttacttcacaatgcgcggttttatctccctttatcagctacagtttaattaaatggtcataaaacaagcgaaaaatagtaaataattaactgctccgagttgtttagcgtacaagtgtacgctaaagtacgtggcaatttctaagcgatgaatgagagttatggaacctaaaaacagctatacaaaagaagaattggtcctttgtggtcaaggtgaaatgttcggtgaaggcaactgtcgtttaccaagtgacaacatgctaatgatggaccgcattatctctatcactgctgacggtggtgagcacggtaaaggtcaaattgttgcagaactagatatcaacccagatctttggttcttcgactgtcactttaaaggtgacccagtaatgccaggttgtcttggccttgatgctatgtggcaattagttggtttcttccttggttggtctggtggtccaggtcttggtcgtgcacttggtgtaggtgaagttaaattcacaggtcaaatcttaccaactgctaaaaaagtaacctatcgattagacatgaaacgtgtaattaaacgtaaattattcatgggtatggcagatggtactgttgaagtagatggtcgtgttatctatgaagcaaaagatcttaaagtaggtcttttccaagatacatctgcgttttaatctttaattaaagatacaaaaaagcccctaaatggggcttttttgcgtaaataaggtgcctatattaagttttaaacatattgcggttttcaatggcttctcgccagccacctaaccattcagatttaggatcgacttgttgataagggcattgttctttagaacggcctgccaagcctgctttataaccttgagaatgagctctttctaaacgatctcttttctgtctcttcataggtaatatcctcacctttttatatttatagatatgtagcgaaattgacatctacatttaatgaatagttaataaaactgttaaattcaaatagcaaaaagcaattaaataaattgacaataactaacgtgctgatgctcaaatgaattaacatttaaaatgactaagtggtcgtacctctttaactaaaaccatctattaatacacttaaattcagctaaaaacgatacagctctttttagcttcagtatttgtgaccaacatcatttgcgcaaagttcccaatttaattgtaatcatgacaaatttatgatgattacaatttaagcaatatagttcttgcatattaaaaaccaatcggtctaatatggttggcatggaaacaaataactctgtgccaagccgtcgtggcaggccaccaaaaatagcacgttcaaatgcagatactcgtgccctattaattaataccgggttagctgtattaaccgaaaaaggctttagtgcaaccggcattgatttaatcttaaaatcagctcaggtacctaagggctctttttatcattatttcaaaagtaagaatgattttggtttagccctcattgatgcatacgacagctattttcaggccaagttaaagcgccatttaacaaatagtgcaaccacccctcttgagaggattgtgctgtttgccaatgacgccaaacaaggcatggcaaaatttgagtttaagcgcggctgcttaattggcaatttaaaccaagagctcagctatcttgatgagccaatgattgatcgtattaaacaggcttacaccagctggcaagctttaatcgagcaatgcttagttgatgctaagaagcaaaagcaaattcctcaatcatcagattgcaaaatgcttgctgagttcttctggattggctgggaaggcgcagtgatgcgctctaaacttgataaatcaagtgaaccgcttaccctttatacagcacaatttttacgcttaattttataaagccgtttaaatacggttttattttaaccattaaaagacgatcggtctaaaaggagtcaccatgacaacatcagtaaaatcggtagttattaataaagatgatcaaggctatcgtgccgaatacacagactttcctgtagagagcatccaccagcatgatgtaaatattgatgttgactacagcacgttaaattacaaagatgccttagcaatcacaggtaaagggccagtggtaagaacatttcctatgatccccgggatcgaccttgcaggcacagtaacagagtctaaaagcgatgaatttaaagtaggcgataaagtgctactaaatggctttggtgttggcgaaaaatacctaggtggcctaagtgaaaaggcgtctatgagtgctgattggctcatccccctacccgctaatttaacaccaaaacaggcaatgcaaattggcactgcgggttatacggcaatgctaagtattatcgcattagaaaaacaaggcatcacgccacaatgtggtgaaatacttgttaccggtgccaatggcggcgtgggtagttttgctatctacttattaaataaacttggctttgatgtggttgcaacaactggccgtataaatgaagcacagcaccttgaaaaattaggcgcaaaacgcgttttatctcgcgaagaattctcagcacctggtaaaccactcgctaaagagcaattcgctggcgcaattgattctgtgggtagccacacccttgcaaatgtgtgtgcatcgattaaatacggaggtgttgtaacagcgtgtgggttagcacaaggaatggactttccagcaacggtagcgccgtttatccttcgtggcattagtctaatgggtatagatagtgtaatgcgccctaaagctgatcgaattgaagcatggcaacgtctaagtgagttagttgaaactcagtacctcgacaccatttcgcaagaaataccgctatctaaagccatagaaaatgcagaagcgttattaaaaggtcaaattcgcggccgtgtagtggttaattgtaaagaataagctcgaatataaacattcttagcaagttagctataaaactagggtaaaggcaattatacttaccctagttttgtaataccggacagtctaatgagtaataaagaaattttcagcaataacccactgcaaggtgtaggtatcgagcaagtagtgacagagcttgtcgagcaatatggctgggaattgctccacgcctacatgcgtttaaactgctttaaaaataatccagatgttaaatctgcggttaagtttttacgtaaaacacaatgggcacaagaaaaagtcgagaacttttatttgtatcgtcttaaaaacttaccacgcccagacgatgtaaactacgagctgccacctcgagatcgcgtgatccctgctgatcaaaaaccaggtgaaccgtgtgagttaagttttaccgacgctaaacgcattcacgcaaaaaaagaagccaagcaacaagcacgaacccgtaaacaacgttcaagtgcgagtaatccttggggcaactaatcaacaattgctagttacgagctgtcaatttataagagccgcctgttgaggcggtttttatgtgagttagcaagttaatatcttcacaaccagtcaaactggtcaatattattttttattaatttaagggtaatctggttatgttacactgagtgcatcatcattaatgtcagttaaaaaggatgtatatgtctaactacaacgaatcacctgaacaaatcgcaaacgcaacacaagatttcgtgatgcaacaaactatgttgcgtattaaagatccaaagccttctttagatttctaccaaaacgttttaggcatgaagttactgggtaaatatgattttcctaaaatggagtttacgctgtactttttaggttatgagcaagacatgccaaaaggtaccgataaagaaaaagcacagtgggtgtttcgccgccctgctcttatcgagcttacgcataattggggcacagaaaacgacgacagctttgctggttaccatagtggaaatgatgaaccaaaaggctttggtcatattggtattagcgtgccagacgtttacgctgcgtgcgaacgttttgcaaaatacgatgttgagtttgtaaaaaaaccagacgatggctcgatgaaaggcttagcttttatcaaagaccctgatgggtattggattgaaatactctcagctgaagggatcactgagataattgaagagcataagtaaaattgcgccgtaaataacctgctatttagcaggtttttatttcataaattagaaatattagaatctaatttctaaaaattagaaaaaccactactttcatcatcacttgatactgtaactgaaagctcatcatctatactttcaaaaactaaaaagttaattggcttacagcaaacctgacaatcttcaatatattgctgatttacgtctgctggatccaataagatttctatttgctcaccacaatacggacaagtaatctttttctctgttaattgattcatcagccagactccttactattgtgatcacttttagtgactttgtttaaatacattcaacatgtaactattaagattcatcaaaatgctcaaaacacttaggaagatatccccaaattcttattgttgttttacccttttcgtaagataaacctatcttatctaaaagctcagttaagctctctgagtgatcatactcttttatagattgatgccttctgacgtctactatttcttcaataaagtataaatctaaccactgaacaccaataaaaggaaatggtaaatgatagcaccactcacaatcccattctgatatttgcccagttacccatttcgaacgaaaaagtggttgccaatttttccattctcgaacttcacagatgagctcattccactttgtattgtttgcagctccttcaagattccgcattttaatacatcttaatgcatcaattttgtctttctaactagctgaagcatcagccaaaggcataaggctcatatatctaacactcttttcggatctcttggaaaaaactcatcgggctgtctggtgcataaatcaaattcacgggtatttttgtaaggtagcttcataaagcctgctacacctacatctgtgatactaaccgcgtattgcataagcttactcaataagcgtttaaattcaggctctttactggcatcaagcagacgatagtaatggtgtattttcatcctatcaggtaaggcttcgaaaatgatacaacccgtgtggtgtatttggttaagctcaaatacgcactttatgacctttttcgggagctgtaattgctcatccgggtctttaccatcttcaaagtaagaatgcggtctggttacgtctgaggcttgtacatccatcacttcataatcaagctcgggtaaatgttcaaatttaaacgcaccggtgccatcacgctctagctgaatggtcttacgcgcatcaaacaaacaacatttaaagagacctttttgttcaatcccctgcgctaacatcaccgtgttgttaatggcatcggtgaaggctgtaccaagtgtttcatcatgtaggataagtgatgattcaacaaacattgagttttctttccaatgaaaacttaagccccctactaccgggtattttgctaatcggctaatagaggccaaaaatgctttttcggtgtcgccggtatcaaataaaaactctttgtagtatctatcgagctgagcatcgtttacatcaagtaattgtttattatggtcggcttgtcttaaaaattgctttcgagaactgtaaaccactgtatctgggtgttcatcaaactcactaaaccaataagggatataaggtcgaatgactttacgaggcagttcaggtaagtaagctttagccattgtaggcatgttacgcataaaataatcacctgcgccatctcgggttgccttatcttttgaaagcataccgtcaatgacccgggcaagctccataggtaaatttaagcttgtagccggaataaccgctgcaccaaatcggcaagattgtgcggaggctaatgcataaagagttgatgcaacaccttgttcatcaaaacgtggcgatgactgcccgcccgacatttgctcatcacctataaaatacacatcacccatacgagcattggtggtgctaatatcagcagacataagatccataaagttgctagcaaccggattcccctctgcgtctatttgtgcataaacagagctgccccagtctaccaatgacaacttattagtttgttcatcataaacaatgttagagggtttaatatcaccatgcacaattggctgtgggcttaagccatttttgtgttcgcgtaaatctacaagcacattacgtaacctaagagccagcgccatgacttttgctgcactgaaacgcccctgtttgatggagattttttctaaatcttcacctagcgcgcgctccatcattaagatgccttgctttttaatgcgctcaaaggcataaaattttggcaccagcggattattaacttgcgaaagcatgtaggcttcgtcttctaagcggtcacgcacactttgtgcaagggttattcgtgaaaacttaaatacccaaggtaggtcttcatcatcgacaccggcaaaaacaaatccaaacgcaccagagccaattaattcaacgtcactgtaaccaagcaaggtaagttgtttaatacaaatgttaagccattgacggtgctttttagcatcatggtgagacagcaaataaacagactgttcttcattgatataaaaattgcggatttgtttgggattcactgcatctctcaaagttaagcggcatttaaccgcttaattattgaatgctaggcagttaattacaaggcttttgctcttcgatgatccagccttgatctttcataagaagctctgatactgcaaaggttaagcagccaaagatggctaactctaataaggtaagaatatcagcggcaaaacaccagcctaaaacccctgcaaataaaaatgggattgcttttaaataccaagcaatttgtcgggttttaccatatgtgagttgataactgtgaactagttcaccctcacactctaatgtgattgtagaagaaaacttcctgaataaagtcactgaaattgttaattggcaggctttaccatcaacattaaactcatgaacagatttcgttttaaagttacgtgattctgctattaattcaccgtctactttcagaacttcttttccagaataagccgaaccccagtattcaattaaatgttcacccgctttgaagttagctttaattcctttgctcattgagactgtaatgccatcagtgctcataaaaaatctccttatcattatgaatttaaaatacttaaaaaataaaaaaacggcaagctaggcttaccgttttggtactttcaatgggtaaagggttaccatttaaaactaaaggcggataccaccatcaatttcaacaacacgacctgtaaagaagtcattctctacaatgtattgtgctgtttgagcaatttcttctgcttcaccaaaacgacccactggcgttaccgccatcatgcgttgttttgcttctggtttcattgcatctgtcattgctgtgcgaataacacctggtgcgattgcaccaacacgaataccaaagcgacctaattctttcgcccaacccgttgtcatcgcaacaacaccggctttagacgctgcatagtttgtttggccaatgttaccagcacgggcaacactcgacatattaacaataacgccgcctttgcctgattcaatcatgtggctcgcagcttcacgaccagctaagaatacaccagttaggttcacatcaattacagattgaaattgagccaacgacattttatcaaccactttgccttcttttgctttgataaacataccatcgcgtaagatacctgcgttattaattaacacaccgatatggccaaagtctttgttaatagtgttaaacgttgctaccacggcgtcttcatctgtgacattagcagcatacgccataacttttgtgccatatttagcaagcgctgatactgcagtatcaagtacgtcttgttgcatatcgataagggcgatgttcgcgccaagggatgcaaatttctcggccatcgcaaagcctaaaccttgcgcaccaccggtaattacgatgttgttgtttttaatttccacaacaatctcctacttcgagaataatttaaaaatagcgctaaaatcatcactacccgcaccttgatgctgaagcatagtgtatagattcttcgccattgaccccattggggtagatgaattactttgctgagccgcttccatagcaagacctaagtctttagccattaaatcaaccataaagcccggtttataatcattacttgctggcgccgtttccattacaccagggcatggattgtaaagctcaagtgtccagttacgacctgagcttgcagtcatgatgtcacttaacacttttgggtcgagcccattgttgatacccatttgtagcgcttcgctggtaccagccattaaaatgctgagcagcatattgttacagatttttgcgacttggcctgcaccaatatcaccagcatgaaagatgtttttacccatatcaactaaagcaagcttagctttttcaaagtggctttgctcaccaccgacgataaaggttaaagtacccgctgttgcacctgcaacaccacctgatacaggtgcgtcaacaaaatcaatgcctttttgagcaagctcgctacccacttgacgcgctgattctgcatcaatggttgaacagtcaatcactaaggttttgctatcaagtaagttaataagacccgtttcacctaagtaaagcgatttaacgtgtttgcttgccggtagcatactgataaaaatatcagcgccaattgcacactcagccgcatcatttgcagcaattgcacctttatcggcaagctcattaaccgctgctttatttaagtcaaacacgcgaactgtatgacctgcattgacaaggtttgccgccattgggccacccatgttgcctaaaccaataaatcctattgttaatttagccatttgtttaccccttggacttaagatgacgttaatgagttaagtgggtgagattgctcatcccagcgtgctgtaaagaagctatctacaactgcttcgtcgatatcgctaagcgatttaaactgccagttaggtgcaccgtctttgtcgattagtagcgcacgaacgccctcttggaactcacctacttcgccacagcgaaccgacatgcctagctccattttgaagcactgtactaacgtcatctcttttgaattagctaattgacgttcaacaagcgcacaactaagcggacaaccatgcgctaatgacttttgcgcacgggtaagccatttatcttcggtttctaaagcttgaatgtagtcaattttgccctgcagtgagtcaaattcagccagcttttgaataacctcaaggttatcttttacgttacctttagggacacgacctgaaatattatcaatagagattagaatgttagtcagcttttcgtgatttaatgaggctgttttgccccacttttcagctatgatagccgttaaaatagcgtcatatttatctgctgttgcatagtgatcagcaagattaacaaacaaggcatcttcagcattgatagacgcagcagttaaccctaaaaataaacccacttgctcaggcattttatgtaagaaataactgccgccaacatctggatataaaccaatggttagctcaggcattgcaatacgtgatgtttcggttaccacacggtgacttgcacctgccattaagccaagaccgccacccataacaataccattaccccaaagtaatattggcttttcatagcagtgaattaggtagtctaatttgtactcatgggtaaaaaagtcttcaatgtagttagcaggctcacctgtgctcattgctttatgaagacttactacatcgccaccagcacaaaatgctttttcgccagctccttttaaaataaccatggcaacagcgtcatcgtcagcccattttctaagctgaggctcaagcagttggatcatgtcgtaatttaaggcatttaacgacttagtcgcattaagtgtcgcaattgcaatgaggccgctttcggcctctgcagtttcaaacaccaccggcgcatcttgatgatttagtagtgttacgttagtcattagccatttacccaatttgctttacgcttttctaagaacgcattcacgccttctttttggtcttgcgtatcaaacaactgaacaaatagctcacgctctaatggcaacgcatgagccataggttgtgtgcgacctttttgaataagttctttacatgcagtcacagcaaccgggctttgttcgccaacttggttagcaagtttcattgccgcagctaaactttcgccagcgccgaccacttcttcaacaaggccaatttcacgtgctttgtctgcttttaagcgctcgccacataaaatcatgcgttttgcccaaccttcaccgacaagccatgcaaggttttgcgtaccgccagcacaaggcagtaagccaactttcgcttcaggaagtgccatttgagcttgctcttcagcaatacgaatatcacacgcaagagccacttcaagaccaccgcccatggcataaccattaattgccgcgattgatacaccacggaaattggttaatgcttcaaatgcatcaccaaacactttagacatagtggcagcaacgcctttatcaccactagcaaacacgtttaaatcggcaccagcactaaagaacttttcaccttggcctgtaatcactaatgcatagacatttctgttagcatttagctcagttacagtgtcttttaatgcagttaatgtatcttgtgtccaggtattcgctggcgggttattcatggttaaaaccgctacgttaccttcaatatttaaatcaatcgatggattagacataggttgctccttatagaatgtcgccagctgactcagctaagatacgacgtgcgataatcacacgcatgatttcgtttgtgccttcaagaatttgatgcacacggacgtctctgaaatgacgctctaaagggtattctttgatgtaaccgtaaccgccgtgaatttgtagtgcgtcgtcacagactttaaaaccaacatctgtagcaaaacgttttgccattgcacagtaagtggttttttcactgtcacccgtatcaagtttaaatgcggctaagcgcaccatttgacgagcggcaacaagctcggtgttcatatcggcaatcttaaattgcagtgcttggaaagcagctaatggcttaccaaactgctcacgctcttttaagtattcgcgagcagtattaagagctgcttgagctgtacctatagaacaagttgcaatgttaatgcgaccaccgtctaagccttgcattgcaaacttaaagccttcgccttcttgacctagtaagttagccgcaggaattctgacaccttcaaagctaattaaacgtgttggctgtgcattccagcccattttttcttcagctttaccgtattcaatacctgctgcatcagctggcacaacaaatgccgaaataccagcagcgccttcaccaccagtgcgcgccataacaaccagtaagtcagtttcaccagcacccgaaataaacattttagagcctgagatcacatactcatcgccctctttaaccgctttggtttttagcgatgcggcatcagagccagaacctggctctgttaaacagtaggacgcaagtaactcacccattactaattgttcacagtactgggctttaacctcatcagtaccaaagcttgcaatcatccacgttgccatattatgaatggtcaacatagcggtcgttgctgtacaacccatagcaagctgttcgaaaataatgcttgaatctaggcgagataaacctaagccacccgcttcttctggggtatataaaccacaaaagccaagctcaccggctgctttaatggtgtctttagggaaaatgtgttcttggtcccacttagctgcattaggcgcaagttcagactctgcaaactgacgggctgtttcagcaaacgcttgctgatcttcggttaaattaaagtccatagtagacctctatttgttgtcttattcttgtgtgaataatgattgttgtcgtttaaatgtgtgttctttgagcgagcgtttgctcgctcagcagtaaattaattacggcttatttaaggttgatactcatgttcggacctgaggcgatatcatcctcaaaccaacgtgaagtaattgttttcgtttctgtgtaaaaacgaataccttgcttaccataggtgtgttggtcaccgtaaaatgagcctttccaacctgtgaaagagaaaaacggaagtggtacaggaattggcacgttgataccaacttgacctacttcgatttcatgttggaatttacgtgcagcagcgccgcttgatgtgaataacgaagtaccgttaccgtaaggcgagttattgataagctcaatcgcctcatcgagtgtatctacaaacatacaagccagtactggaccaaagatctcttctttgtataaatccatttctgttgttacatcagtaaataatgttgggccaacccagttgccttgctcgtagccttcaacagtaaagtcagagccatcaattaagcacgttgcaccttgttctttaccacttgcgataagtgataaaatacgatcttttgccgcttttgatgtttgtgggccgtaggccgcgtttgcatcatcccatacaccagggcgtacgttttcaaagcctgctttaatttcatcaacccagtcttttgcttgaccaacaaacacagcaaccgaaatacccatacagcgctgacccgcagcacctacagacgcacctactaggttgtttacaacatgcgatttacttgcatcaggcataataaccatgtggttttttgcacctacacaagcttgcacgcgtttaaggtttgctgtgccttttgaatagatgtattcacctacaccacacgaaccaacaaatgaaatagcgcgtactgctgggtcttctaataaacggtcaacttgtggttttgtaccatgaacaacttgtaacaccccttttggcgcacccgcttcaacaaatagttcagctaaacgcattggtgttaatggatcttgttctgatggtttaagaataaaggtgttaccacacacaatagccagtgggaacatccataaagggatcattgcagggaagttaaatggcgtaatacccgcacatacacccagtggctgcatgtaagagtatgtatcgattttacgcgctacgttttccattgtttcgcccatcattagtgatggtgcattggctgcttgctcaaccacttcaataccacgccaaacatcgcctttggcatcttcaaatgttttacccagctcatgacaaataatcgtcgcaagctcgtcatggttttcttttagtagtgctgcgtatttcatcataatgcgcgcacgctcagaaattggcacttctttccatgttttaaatgtttcttttgcagaggcaatggctgcatccatttcagcatccgttgcacacggaacttgcgctaacacttcttggtttgcaggattgataacatcaatcaactgcgttgaacttgattgggtaaattcgccgttgataaataaaggtacttggtgcatgaggcactcctccccagtgggtataaagaggccgcaacatgatagtttttaaaatacgttgcggctgtgagagattaaaattataaagtgattaaatagcttcgattgccatagcaacagcttcaccaccaccgatacacagtgaggcaacacctttgctaagaccacgattctttaatgcataaattaaggtaactaagatacgcgcgccgcttgcaccaattgggtgaccaagtgcacaggcaccgccgtttacgtttactttggtttcatcaagttttaactcgttaattgcaagcatagtcaccatggcaaacgcttcgttgatttcccacaaatcaacatcattcacagaccaacctgctttttctaaaagcgattgcatcgcgccaaccggtgctaaagtaaattcgcttggagcctgagaatgtgtgctgtgagcaacgatacggcaaagtggcgttaaaccttgtgctttagcatctgattcacgcattaacacaagcgctgctgcaccatcagaaattgatgacgagtttgcagctgtaatcgtgccatcttttttaaatgcaggacgtaaacctgggattttatcagggcgtgcattgcctggttgctcatcaatagcaacggtcacatcacctttacgtgtagaaatagtgtgtgctgcaatttcattatcaaatgcgcctgtctcaatcgcgctgtttgctttagtcagtgagctaagtgcaaagttatccatttgttcacgaccaattgaatattgatcggcagtgtcttgtgcaaaacaacccattgctttgttgtcgtaagcatcttcaaggccatcacacatcatatgatcttttactacgccatgacccatacgcatacctgaacgtgcattcggtaacatataaggcgcattactcatgctttccataccacccgcaacagcggtgtttatagagcctgacttaattaagtcatgggcaaacattgcagcttttaagccagagccacatactttgttgattgttgttgcgccagtaccttgattaaggcccgcttttaacattgcttggcgagcaggtgcttgaccaagaccagctggtaatacacagcccatgatcacttcgtcaatcttatcggcagataaaccggcttgctctaagctacttttaatagctgtagcacctaaatcagttgcgtgagcaccactaagtgcgcccataaaaccacccataggggtacgttttgcggcaacaataacaacggcttcagtagtcataattggctccatgttagtggttatcatcatgtgttcaaatcatgtgtaaccaaacagttaatttgttatagtttaatttcgatttaattcagcatacataatatttacgtttacgccaacgtaaatctaaaatcaacttttttgcggtcgttaaaactgtaaacttatctgtattttgttgtattaaaaatcgaacatctgcttacaaggctagataaatagagctttccaacaaatccaatcagttatctttataagtctaaagtataactcccaaatcaccctttacctttacgtaaacttcacttatattggagttattcgaatgaggtaaataaatcatgaaacaagacaatcaaacaaactttgaaagcgcagcagttgaacctgctagcaatgagcaaacgtttagtatcagcgaactagcaaaagaatttgatattaccacccgctctatccgcttttacgaagaccaaggcctaatatcacctgagcgcaatggccaaacccgtatttattcaaaacgcgacaaagtaagactaaaacttattctacgcggtaaacgcttaggttttaccttggctgaaacgggtcgtttgtttgaactttacgatgctgataaatcaagcgctaaacagctagtgactatgcttgaccttatcgcagagaaaaaagcggacctaagccaacaaatggacgacattaaagttgtactgatggaattggttacagcagaacgccgctgtcgtgaaacccttaataatttagacgaataacctgacaacaatctcgtcaacagactctcacaggaacacacattatgagcactatttcactatacaaagaaatgaacttcggacttggcgaaacagcagacatgatccgcgatcacgttaatagctttgctagccaagaaatcgcaccacttgcagaacaaacagatttagacaatgccttccctaatcaactttggccacaacttggcgaaatgggtttattaggtatgacagtgcctgaagaatttggcggtgctggccttggttaccttgagcacgtaatcgcaatggaagaaattagccgtgcaagtgcatcaattggtttaagttatggtgctcattcaaacttatgtgttaaccaaattaaccgtaatggtactcaggctcaaaaagaaaagtacttaccaaaacttatcagcggtgagcacattggtgcccttgcgatgagtgagccaaacgcgggttctgatgttgtatcaatgaaattgaaagctgagaaaaaaggcgatgtatttgtacttaacggtaacaaaatgtggatcactaatggtccagatgccgatacctttgttatctatgcaaaaacagatttaaatgccggccctaaaggcatcacagcgttcatcgttgaacgtaacacaccgggattctcgactgcgcaaaagctagacaaacttggtatgcgcggctctaacacctgtgaattagtgtttgagaactgcgaagtaccagcagaaaacattctaggtaacttaaacgaaggcgtaaaagtacttatgagtggccttgattatgagcgtgttgttttagcggcaggcccgcttggcattatgcaagcatgtatggacattgtggttccttatattcatgagcgtaaacaatttgatagcccaattggtcagttccagcttattcaaggcaaaatcgctgatatgtacacgcaaatgaatgctgctcgttcatacgtttacacggtagctcgtgcatgtgaccgcggcgaaacaacgcgtaaagatgccgctggcgcaattttatatgccgcagagctggcaactaagatggcccttgatgctatccaaatcttaggcggtaatggttatatcaacgaatacgcgacaggtcgtttattacgtgatgcaaaactatatgaaattggcgcaggtacttcagaaatccgccgcatgctaattggccgcgaattattcactgaaagccgataggaccttgttatgacgattttaaaatcgagtgtaaatccacacgatccgcaatttttgcaaaatcacgacaacatggcagcactcgtaactgacttacgtgaaaaagtagctgatatccgtttaggcggtggtcctgctctgattgagcgccaccaaggccgtggtaagttgtttgttcgtgaccgtattgaaacgctacttgatgaaggctcgccatttttagagatttcacagtttgcagcctttggcgtgtatgaacaagcgattccttgtgccggtgttgttgccggtattggtcgtgtgaaaggcgttgaatgtatgatcatcgccaatgatgcaaccgtaaaaggcggtacatactttccactaacagtgaaaaaacatctacgcgcccaagatatcgcagagcgttgtcatttaccctgtatttatttagttgattcaggtggtgcaaacctgcctgaacaagatgatgtatttccagataaattacactttggccgtattttctataatcaagctcgtatgtctggtaaaggcattcctcaaattgcggtcgtaatgggtttatgtactgcaggtggtgcttatgtaccagcgatggctgatgaaagtattatcgtaaaagagcaaggcacaattttcttagcaggcccgccactggttaaagcggctacaggtgaagaagtgagtgctgaagagctcggtggtgccgatgttcactgtaaaacatcaggtgttgccgatcactatgctgaaaacgatgcccatgcactttcgattgctcgccaatgtattgaacgaattaattatcagcgccctactgcaccgttacttgatgatgttaaaccgccgcgttacgacattaacgaaatttacggcattgtgggtaccgaccttaaaaagccatttgatgtacgcgaagtgattgcccgtgttgttgatgattcatcatttgatgaatttaaacgctactttggcgaaaccttagtaactggctttgcaaaaatctttggtcacccagtcggtattgttgccaacaacggcattttatttagtgaatcggcgcaaaaaggcgcgcactttattcaactatgtgcacaacgcaaaattcctttggtgtttttacaaaacattactggttttatggttggtaaaaaatacgaagccgaaggcatcgccaaacatggggcgaaaatggtaaccgctgtgtcatgtgctgatgtaccaaaattcaccgtattaattggtggctcgtatggtgcgggtaactacggtatgtgtggccgtgcattcgaaccaaccatgatgtggatgtggccaaacgcccgtatttctgtaatgggtggtgaacaagcagctggcgttcttgcacaagttaaacaagacggtttagcccgtaaaggcgaaagcatgactgatgagcaagtcagtgagtttaaaaagccaattatcgagcaatacgaaaaacaaggtcatccatattacgccagtgcccgcctttgggatgatggcattatcgatcctgctgatacccgcaatgtattagggcttgccttaagtgcagctaaaaatgcaccagagcgcgattcgcagttcggcgtatttagaatgtaatggaggccttatgtcagtaacactcgaaataacaaaatcaaatgtggctgtgctggtactaagtcgccctgaaaaacacaatgcatttaacgaagaagtcatcagtgagctgatccgtttaattgaacacgcaaacagttgcgatgtgcgcgcactggttttaaaaaccgaaggtaagcacttctctgctggggctgatttaaattggatgaagtcgatggctggcaatgactttgctgaaaacttagcggattctatgcagctggcaaagcttatgaaagtccttgctacaagccctcaccctacaatttgtgccgtacaaggtgctgcatttggcggtgccttaggcttgattgcctgttgtgatattgcgatttgccaagatgatgcgcaattttgcttaagtgaagtaaagctgggtcttattcctgcggttatcagcccttatgtcattaaagctattggtgaacgcgctgcacgtcgttactttttaacggctgagatttttgacgcgcatacagccaagcaactgggtttaattcaccagatcaccggcgatttacaaacagcgctcgacaaacacttacaaaaccttgtgaacaatggccctattgccgttaaagcagcaaagcagcttataaatgatgtggctggcaatgtaattgatgatgcactgattgagttaaccgctgagcgcattgcacgcattcgtgtatctgaagaaggccaagaaggcctaactgctttttttgaaaaacgtgcccctaactggcagaaataggaaccattatgacaacaaaatcattgaaaaaaattctcgttgccaaccgtggtgaaattgcctgccgagttatgcgtacagcaaagcaaatgggcttaacaacggttgcagtgtactcagatgctgataaacatgctcagcacgtaaagcttgctgatgaggcgtatcacattggtcctgcgccaagtaaagactcatacttagtggcagacaaaatcatcgatgtggcaaaacaagcaggtgttgattgtattcatccaggttatggctttttatctgagaactctgactttgcgctcgcgtgtgagaaaaatgatatcgcctttattggcccaccagcatctagcattgaagccatgggctcaaaaacccgcgctaaagaaataatgcaccaagcgaatgtacctttagtacctggttattatggtgataatcaagatactgagttcttacaagctgaagctgaaaaaattggttatcccgtacttattaaagctgcctttggtggcggtggtaaaggtatgcgagttgttgaacacgcaaaagactttatcagtgctcttgaaggtgcaaaacgtgaagcaaaagctggttttggtaacgatttagtactgttagagcgctatgtcaccaaacctcgccatgttgaagtacaagtttttgcagatagccatggtaactgtgtgtacttaggcgaccgtgactgctctttacagcgtcgtcaccaaaaagtaattgaagaagcccctgctccgggtttatctgatgcacttcgtaaagaaatgggtgaagctgcggtacgttgtgctcaagcgattaactatcgcggtgcaggtacggttgagtttttactttgcggtgatgaattcttcttcatggaaatgaacacccgtttacaggtagagcacccagtaacagaaatggttactggtgttgatttggtgaattggcaaatcaacattgcggcaggtgaagcattaccacttagccaagcagatattcaactgcaaggtcacagctttgaagcgcgtatttatgctgaagatccaagtaatgactttattccgtgttctggccacattgatgctctatttacaccgaacgaatctgaatttgtacgtatagatacagggattgcagcgggtgatgaaattagcccgttctacgatcctatgattgctaagttaattgttcatgacgatacccgtgaggcagcgcttgggcgtttatcaaaagcactagagcaattccacctatcaggttttagctgtaacgttaatttcttacataatcttgctaaccacccaacttttcaagcaggtgcacccgatacgcactttattgaagaccaatgtgaacgccttgttgctaaaagcgagcaacaatctgttattgcaactgttgtggcagcctatgcgtatgcacatcaactaaaaggtgaaagcagcagcccatggcaacaattaacaggctttatgctaaacagtgacgctaaaacaacaattccgtttgttgatttaaacgttcatgctgttaaggcgtcagaaggctttaaaatcaacctagatggagttgactatacaacttcaggtagcgttgaaaatggccttgcgaacttagtcgttaatggcgaaaaagtcgttgctcatattaatcaaacagactctcacatcacagtgatgtacaaagcacagcaaacggtgctagagctgattgataaacactatattagtgaacatgaaagtgatgcactaccacttgctgcgccactcaatggtactgttgttaagcatttggttgaggtgggtagtacggttgctaaaggtgatgcggtcgtcattattgaagctatgaaaatggaatacacactcaatgccccgcatgatggtgtattaacgagctattgctttgctgaaggtgaactggtgagtcacggtgatatgctcgcgatcgttgaagagccggaggcgtaatggcacagtttcctgattttgttcgcattgtagaagttggcgccagagacggtttgcaaaatgaagcagccgttagtactcaagataaagtcgctcttatcaacgctcttgctgaagcaggccttaaagatattgaagccggcgcatttgtgtcacctaaatgggtgccacaaatggctgactctagcgatgtaattagcgcgttaaatttgcctagtgttaacttaagtgccctcaccccaaatttacggggtgcagaagcagcaaaacaagtcgacattcaagaatttgctatctttacagcggcaagtgaagcgttttgtcaaaagaacattaactgctctattgatgaaagtattgatcgctttaaagatgtgatggcttttgccaaagcgaataacattcgtgttagaggttatgtgagctgcgttatgggttgcccatatcaaggtgatgtcgactacaatgatgtattaaaagtatcacaaagattacttgagcttggctgttacgaaattagcctaggtgacaccattggtgtgggtacggcgaaaaaagtcgatgagttattagatttacttttgcaacatattgataaatcaaaactcgctgtacattttcacgacacctacgggcaagcgctcacaaatatttacaccgccctaagccgcggtatagcaacggttgacagtgctgttgcaggccttggtggttgcccttatgccaaaggcgcgtcaggaaatgttgccactgaagatgtagtttacttactgcaagggcttggcatagagcatggaattgatttagaaagactggcaaaagctggttgggctatttgcagtgcattaaataaacaacctgtcagcaaggtatcacttgctctaaagaacactcagaataattaaggagtaggctcatggccggtttcgataaagtggtttcaagttatgaagctgcaatggaaggtttaaaagatggcgatactgttatcgctggtggctttggcttgtgtggtattcctgagggacttatcaatgaaattaagcgtaaacagactaaaaatctaaccgttgtttcaaacaactgcggcgtagatgattttggtttaggtattttacttcatgacaagcaaattaaaaaaatcatcgcttcttatgtaggtgaaaatgcgcttttcgaaaaacaactactcgatggcgaaattgatgtagtactaacaccgcaaggtacactcgctgagaagatgcgtgccggtggtgctggtattcctgcgttttatactgctacaggttacggcactccggttgcacaaggtaaagaagtaaaagaatttgatggtcgcccgtatatcttagaagaatcaattacgggtgagtttgccattgttaaagcatggaaagccgaccgctacggtaaccttgtatttcgccacacagcaatgaacttcaatcctatggctgcgacagcaggtaaaatcactgttgctgaagtagaagtgattgttgagcctggagaacttgagccaagccaaattcataccccaggtatttatgttaatcgcgtgatcaaaggtaactttgaaaaacgcattgaacgtgtaacaactcgcgattaaggagcaataaaatggcattatcacgtgaacaagttgcaatgcgtgttgcacaagaactacaagatggctattacgtaaacctaggtattggtatccctactctagtagctaattatgtaccagaaggtattgaagtcatgctacagtctgagaatggcttattaggtatgggtgcgtacccaactaaagaccaagttgatgcagatatgatcaatgcgggtaaagaaaccgtgacagcagctacaggtgcggcgatatttaatagtgcagatagttttgccatgatacggggtggtcatgtagacttaacagtattaggtgcatttgaagttgaccagaacggtaacatcgcatcgtggatgatcccaaagaagctaattaaaggcatgggtggcgcgatggacctcgttgctggcgcgaagaatattattgttacgatgactcatgcaagcaagcatggtgactctaagttattagaaagttgcactttaccgctaactggggttaactgtgtaaagaaaatcgtaactgatttagccgtactagaagttaaagacggcgcatttcatctaatcgaacgcgctccaggcgtgtcagtagatgaaattattagcaaaacggcaggcaaattgcttgttgaaggtgatgttccagagatggttttttaaaccactcataccagtcgtgttgagttattaggcatttatagcgacggaaaaatagagtgataacaaggcagaaatttagacgtgtagttactctacattagaaatttctaacgcagttagcgctttatttagcacgctagaatgactaagtatttaagtcgattggtatcatcccatgtaccgacctcattcccagtgccaatggcgctgagttacccaaaatccctcgcaagagggattttttttatctcttagctacagaacttttgcaccaatttgtcacacaaatggtttaaaatgccctaactttgtgaggtgaaagtctttgaggcttagggtgttacctgtttcagaaaaatggtaaaattcacaatccacaataaaagtagattaaacaatcaattaccgaatgttttttatgcgtttatgcaaagattagctatatttattttttactctcttactttttacattttgggataataattgcttagcagttaattaactaacaagcgctattgagacttactgaaattaactatgcaaacacctattcgtggcttacgctcattttgttttgctgcacgtactcttagttttaaagatgcggcaaaccaactttaccttacaccttctgccgtaagccatcagatcaaacaattagaagaacaattgggtattgaactgtttgaacgtcaaacccgctcaattcgcctgacagctgcaggtaagaatttttatgactctgtgtcaccgcttataaaagcgcttgaaaaaaccatcaacgagtttagtcaattacaagagaatgtgactattagcatcacactgcctgaatttttcgccagtgaacttttaatgccgaagctaagtgaatggactagtgaacaccctaatactaacttacagcttaataccttaaaaacgcgtaaagagctgactaagcaaagtgatttatcgatagtattgtcttcgtctaaaccgcatgaaggcgttgtacatgagctgttttcgctatcgtatacaccagcatgtaataaagaaaactggcaagcatggcaagaaaacccatttcaggccttaaacgaagtacctcttatacttcacaaagcgcgtccttgggcttggcaccaatgggcagaacatgccggtgtagaagacttcgcaccaaagcaaattattcaggttgatagtatgtttggtgtggcacgtgcagcgcaacagggtatgggtattgccctaatccccttacctattagtcagacttggtttgatgagcaatggctatttaatttcactgatatgccattaaaaaccaaagacaaatactacttagtgcaacatgaccctagcgaaacaaatgcacagctagagctgtttattaaatggatgattgatacttttaaacatctaaaataacaaataatcacgaccctcaacttcattgagggtcttttattgcaaatttagcttttagacttggttactaaaatacttactttattttcaccaatttcaaaagacgcctgtttaccatactccacaataaaagaaggtgtaaaatagctaccagcgagtgtgattgatgtttctacagctgccgtattattttgttgtggtgtaactttaacttcataactaaacccctcacctatagagatggtcgcaggttgtttttcttccaccagcattactggcgatgctagtagctcattcgctttataaacagatgtttcaacttgaaagctatcagctgcgaagcaacttgttgatgctaaaaatacgcctgcgactaaacctaactgtttgtacatatttatttccttatctcatttatagggtttatccgtaattaatatcagttagtacgtttatttgatacacggaaatttctgaatctataactatgtctattaaagctctcggtaataaacatcgatagtatgtgatattgcttcataacggttattttcatgtttaaaacaggctttgcgtagttccttctcttcgtagtttttacctgctactacgacttgatctaaagtttgtgaacttgcacagaattgctgttttgaaattgtttctattttaactgattcagcttttgagcgtggcaatgaactaggctttgggttttgcttcatgccctgaagtaactgagctttagtaactggtaaagtatctgaccctatgcctggaatatgcaatgtttgtctaatcgtatagtttttacttaataatggcgtaaacaaagatacatcgttgctcaaataagcctgctcaaaattaagataaacagcgactttatcttcagctgcattggcaataacaggccctaaaagtaacaacgcaaatatcagtttcatggttatacgcttattctaaataaattaagtcatcaactatacataccaccttaaagtaccgattcagtcattaataaacaacaatttgtttgttttgcatactcagcccctttattgttcgttagcgtaaactttagctattaaaaccccgtgtctactttatcggggtcagatcagacggcttacggctttaagactaactcactaaattagactaaagtctataggttaaatttcttcatctattaggtcattttttatcgtttgttgaattttcgctgttcaattaaagttcatttgtcggcgattgataccgattcaaatagaggaaaagattatgtttagtacacttatgaaacgcgttgcacttagctctttattaacttgttcagctatggcagtggctgatcagagtgactacaaattgatggtaattgaccaatctatcactgctgatattgcagaaaaccgtcaatacgaacaagcatttaatgactgtgctttaagtgttaaagagaaaaaattctctgaagctgaaacactttgctcaaaagcaatcagcttactaagtacaagtaaagtacctagctataaacgtcgcgaattaacatcatttacgttaagtaaccgtggtgttgctcgcatcatgtctgaaaacgacactgctgcattgtctgacttttacgaagcagtacaaatttcaggtaacgagttagtagagcacaacttaactcgtgctaaaaagaacttagcgttataagttctcacagaattgtgttgtctcaaaacccagcttcggctgggttttgtcgtttatgtactttgaatgcctcccaacacttaaatagcttgttttatagaaggctttcaaattcaacattgctttataaaacccaaaacaaaacaaacgccaacataaaaccaaataacgcttgcaactatttgccaaatatctaagcctgaggttgtaataaatgtcggaatagcaattaaaccccgtaaagtacaaattaccgcaatagttactaaagcaggtttgagaaaaggaacttttcggattaagcccgccgctgaaaaagcaaacacagtacaagcaaacattaagctcgctactattagtgtgccaatgggggcaagcaaagttccgtgtattgaagattcaataatttgttgaggagccctagcaaaaacataccaactaggcccgccaaatatacagagtacgtgccagatagcagaaaaaaacgcaataacacctgcactaattaataattttgattgaatactaaggcgcaatattgactccgttttactgtaatcttaggccgtattaaagcaaatcgactataatccacttcaaacctttctaatccgaaatttcacatccccaaaagaggtaatccctttcgctgcttatacgttaaagctaacatcaaacatgactttatcattacttttggtaacgatgttgataaacaaagaactatagctctattcccttgaaaatgaagcttttcaccatatagttcacgaaatgtatctaccaatttaatttggcagttgaaaaacagataataattgttaggtgactttgacttccagtcgattcgaaaagggctgcctgtttttacactgtagctaggctctccccattttagtgtctcgtcaacttcacctaggcccaattcagatgcaatttgaaaaactagctctcgaatctcgaagagcttagctccggcattttcagggtatttatcaaatgtgttttttacttccttgttcatttgagtctccggttattcattttattcagtaaaataaaatgtatggtttgaaaaatcgatgaagcagtgctgccatacaataagcctacttgtattttagactcattcaccacttgcttcagataatgcctgtttgtagcttaaatcaaagtttttgagtaactgattcaggtagttcaggtttatctggttaggtttaaaactttgccctttttctatatttgctatgtgtttttttagcttttctttatctttattccaaaaagcaatgtttcctaacacaaagtcattccaatacatttttgaggaagttaaatcttcatgcggatccaatacttttttagcgtgaaaaaccgcttgttgataatcacccgccaagccttccatttgagctaaatgccacgttaacgagctttcttttgaattattatgagaaataaaacgttttatcagaatagcggcttcagcatggcaacctgatttttctaataacctaaacccagcatcgtatgtctgatcaaattgctggtatgtaaggttcaaatcgtcttttaacctttcttcaagcgctacttcacaatctgcaaaagcaagatttgatataaataataacccgatagataaaattcctgttttcataattctgtccttaaatttactaatgcctgtatatgataaaactgctataaaacgctaagttcaccacgaattaaatgtagttggctttaaataacctttaaattgttgttacttttctagatcatggtaaacatttggattccaaatttgcataaacatctctggattttcaattggtagaaaaccatattgcgcgtacaaaccatgcgcatctcttgttgccaacaccatacgccttaagccttgaagctctgggtgagagactatgctctcaacaagccacttgctcaaacctttgcctcgatggctctctactatgaatacatcagcaagataggcaaatgttgctttgtctgttatgaggcgggcaaaacctatttgagagtcttggctgtcataaacaccaaaacaaaacgagtttgcaatggctttttctaacgtatgttttggtattcctgacgcccaatagctttttgaaataaaaccgtaaattacttcaaaatcgaggtcagttttatctgtgctgattttatatccttgcaccagtattcctttgtgatgttaacacctgttatttaagagaatcagttttaacaaagttactaaccgattgctacatatataattaaaacgcttttttaacaggatatagcctactgacacaaacactaccacaacgtaaaaccattacattgttattaaatttaacaataatagatttgcaggttgctcataaggggctttaatacgcccctctttttaatgaatttttacaaacgctttatgagttgatctacttttgccacaacaggccatgctgaagattgaaaattccccaaaacaactagaatataacctttttcttgatacatatttaaccttgctgtcatgcctaaatgggaaccattatgaccaacagttgtattccctgctgaacttctcacagagaaaccatatccccagtttggtgcatttagctcaggttttgctgataaggctttattagagagttcacgacttactagttgagcattttgcattgccatggcgaatttgtgtaaatcgcctacagttgaataacctccgcctgcaggtcccccttttaccgattgaaacatcaaattttctgttacttgaccagtttcgacagaaaaccaataattacgggcagtatttttgacaggcacatctaagtcataacttccgctttgttgcatgttagcttttttatatacattttcatttatgtaatcatagtaattttcaccagttacattctcaatcacctgaccaagtagaaccatacccgtattgctgtaacgccattcagttccgggttcaaatgtagcgtcaattgaactgtataaatgttggatatctttaagagaccgcaccttattttgtatctcgtcatagccagaaataataccaatccctgatgtatggcttaataagtgtcgaatcttaattttgctaaaatcacctttccctaaaatgcttttatcaataaatttagtgagcggatcatcaagcgatactttgccagcttctattagctgtaagatagcgacgctagtaaacattttgttcattgagccaatttgaaacttcgtttctaagttatttttcacatcatagcgacgtgaagcaaagccatatgcagcgctaaacaaaatgtcattatttttagcaagtaataccgtgccagagaaactacctctttgcgccagtttatcagtataaattttgatctcttcaataaattgtgactcagttaaagagctttttgaaccttggttttgtggagtttcttcaatagaccaccctgttattgcttgaaattgctcatcattaaaaaataacactacttgatgctgcatatctgtattctttgaataaactttacttatatgacggatgcgattagttgacgtatcaagttctgtagaaataacactcaactctccatgaaaaagcgcaacattcatcgaatacccaacataacggtctttacctttaccctcccagcgtgcaagagaatttggcgagaagttctttactataaatttttcgatctcatctaaatctttagtgtttaaaaccgtaataaattgacttgccaatttgttatagtctacctctttcattgcatgtgctttatggctaataaaacacatgaaaaatatgagcattagtaaatatcgcttcactttacattccttttattgtttattgaataatatggcgcttggcctttcgatacttttacttttgcgaataacaaaaagcgatgaagtagtgattaagaaaagcttaagaaaacattaagctgaaaataagtaataataacaaatggataactataaacttgagtgaaagtaaattatcaaaacaattttttcttaatgactctttggttaattttgagactggcgaaattcaaacagatggtaaagttgttgttgtagagcctaaggtgatggcacttcttgaagtattttcgcaaaaaccacatcaagtgttatcagccgaaatgctttttgctaatgtttggccacaagctattttcagtcctaattcagttcgcagaaatattgctttgttaagacaagcgttatccgatgaagaaaagcacattataaaaacacacccaaagcggggctatagtctcgaggctgaaatacgttttcctgatgaaaaaacgagcgctccattagcaaaaatacatcagataaaaaatacaaaactagcactcttaattatccctgctttgtttatcattatcctccttttcaatttccttaacgaagataaacagatttctttagaagatcttaagcctattactgcaagcaatgaaaaagagcgttacctacaagttagtcctgatgggcgttttatggcttatatacaaaataccaatcgtcctaataagcgaaggcttttaatcaaagatttacaattaaattcatataaagaattaagtacagacttaaaagcgtttacctaccttgcatgggatacagatacaaatacgcttgtatattcgtttcaagatgaagggagtatttcattcaatcgactgcaactagatacagaagcgaacgtgatcagcgaagaaaaactcttttctcgtacagatataacctggaacagcttgttttttatagatgaacaagaaaaccttttctatttagcaaatcaaaacagttccgaacacagccgtaatgtaagcctatatcgacataacttgattactggccattcttacgaaattcttcaaccaaatgatgatttcaagccctacaagctcgctttatcacctaaccagaaacaattagcgataattggcttcaatgaagatgcaatctcggaggtaaaactattaaatttatcgagttttaaccttgaatcagtcgttgaaattgatcataactggcactttatgacttggtttaacgatggtgactctttgttattgagtaatggcagtaagttaaaacaacttgaattaaacggccaattaacgactcttaactttaaaagctataactttttgatttatccacaaatcgttaaggacaaactgtattttattgaggctaagtctgatcaagatattttgattagcgctttagattcactctctactcctataaaaatcgtaaactctaataccattgataaagaagctgcactttcacctgatgaaaaactcatcgcctacatgtcaatgaaaaatggacttccacaactttttattaaacatattgagactgaagaagaacaattattgttcgttaacactgagcaagaatatgctttatcaaaaccaatatgggacccctctggaacacgtatcgcaagcagtataaataacaaaccatttcttattaagctagaggaagaccagttcgcaatcgaatggttaaatggaatcattgggtatccaatcgggtggtataaacagtcagatgctattttgtttgttgataagaacactcacaatgatgaaatagttaaatttgatttagttactgacgaaatagtgtcattaaaaacgaaattgaaagataaaaatatttttttaaatgataacgacgaattactgagtttttcaattggccaagtaatcactgcttctggtaccaatctatttgataatacgcattttatttcaagcatttaccctattaaaaatggcttctattttcaatacaaagaaaacgactcaaggacaatgaatttttacgattatgaactaggtgttcaaaatttaagtattgattttgaaaagttttgtgcggatttatgtagtcaaataactgctataagcggtaatactatcttactcaaagaacaaactgatacagcagatattttagttttgaatattacattaaataaatagcttcaatcataactagctgatctagagtatgtgttttcaaccaaactgataacatcagtacataaatagcattcacaaaacaaagcttattgtgtttgaaagtaattttcagacactctcctctctaattttccctactaaattgctgagaactgagtaattactctatagattaaatttcttcatctatcagttctaatttaatcgtttgtttagcttataggaatattttaaagttcactcgttggcaagaaacaccaacttattcagaggaaaactatcatgttaaaaacacttgtaaccactattgcacttagctctttattaacttgctcagcgatggcagtagccgaccaagctgattataaactgatggttattgagcaggctcaaacaaacgataatgtaagcaatgaatatgaaactgcattcaaccgctgtgcattaagcgtaaaagaaaagaatttttcagaagctgaaaacctatgtacacaagcgatttcacttctaaacacaagtaaagtaccaggttacaaacgccgtgaattaacatcatttgcgttaagtaatcgcggtgttgcacgcatcatgtcagaaaatgatacagctgcaatctcagacttttatgaagcagttcaaatctcaaaaaatgaactggtaaatcataacttaaaccgcgcgaagcaaaacttagcgctgtaatagttagcccaaccaaattgttgtcgtaagcccggtccttgtgtgttctgactgggcttttttttgtctaaaatatacactcaagccacctacccaataagatattttttttcatctaatgggtgtatttttgtcgtttgtcaatcagtaacactgtttctaaattaatagagtaagtgatgtacttacattattaaggagataaacaatgttcaagttcatacctgtcaaaaccatcttgattacctcactttgcatgagttcgaattgggtgttagcaaatgatatcgactttaaactaatggtagtggatgacgaagcctcatcaattgcgattatgcaaggtgactacaatgctggtttagtaacgtctgctgaagatccagcaaatcaatatatagcgccttttaatcgctgtgttgcaagtgtaaagctaaagcagtttgaaaaagctgaagctgactgtactgaagcaataagcctattaaaagagattaaagcatctcgatttaaacgtaatgaattaacgtcgtttgcattaagtaaccgaggtgtcgcgcgatttatggctaataatgatacggcagcaattgctgacttttatgaagcctcaagactcgatgataatgaatatgtatcatttaatttaaatcgcgcaaaacaggaattaaaattgtggtaatgactgattctaatgctgaaaaaccagccataatggctggtttttttgtatctacgttaaatttgatcacgtggcacaaaatcaagcaccgtcgcattaatgcagtatctatctttacctcttggcccttcccccgggaataagtgtcccaagtgaatacctgagcttttagatttaagctcaatgcgctgcatgccataactgttgtcttcatgcatggtcacactgtcttttaccgggtgagtaaatgaaagccaaccagttcccgaattaaacctatctcgggtatcaaaaagcggcgcaccacttagcttatcaacaaaaataccatccggtgtgtttttaaagatatcgtattgtttacaaaatgggctatctgttctggcatggaatgcaactctgaatgcttcactatcacctaatttaaatgcccctagcgctttataaaactcatctttactcacataaccttgacggccatatacctcttcgccattttctataaataataacgtgggtgttgcccatgttggggttttaatttttaagccatcaagctgatctgcatgacggaatgtcataggtatcgagcccatgtactcattagcgacttcttttttaaacttttcacagtatgggcaatagcctttagcatctatcacgactatttgcttattggttagtaaggccgtgttatcaacttgctgtttttctactggcgtaaaaacaacccctgttgagtgatcaggacaatagccattagggtttttctttaaataatcttgatgatagtcctctgccgcataaaacgaatcgagaggttttataatagtaacaatcttgccgtaccctgctgcggttaacttaccttggtattcatctttaagtttattagcaacctcaatttgctgattattacttgccaaaattgttgagcggtattgagtgccaatatcattgccttggcgatttaactgagttagatcatgattttcgaaatagtattttaataattcttctgtcgttaactgattactgttgtaagtcactttaacaacttctgcatagttattttcatcaaatcgacgtgcgctacgcgttatgtttctataggttgctttaaaaccgctaccgtcagcataaccagataccgcatctaaaacaccatcaagtgcttcgtatcgtttttcggctccccaaaagcaaccagaaccaagcacaattgtttcaatatgtccggttgcgttgtctggtatctcttgcgctgttgtatgattgatggtgaaaatggcactgcaagtgaataatgtcagtaatatcgacttaattgtcatacttatttcctcgtaaaagcctgtaatagagcagaccgagtaatcctatttattatttcaccttaaacgcatgcaaacggctgttcaccgctaacaatttaactcttaagcctatttacggtaaaacacagctttttaacattgggatattaaaaatgagaattgcacacagtttgtctgctcttgctctgggtataacacttgctacgcaagttaatgcagcagagttcacttttgcaaaatcgattcaaccgaaagacaacacattagtgttgtttttagacacagatagccaagttgctaactttaattacttaaaaccagaaactcaaaaccacttaaataaagttatcgaatttagtgactttaaagcggactatggcaaaacattagaagttatcgcaccaaatggcagcgaacaccaacgtattgtgcttgtaggcttaggtgagcaagctgaacttaatgcagctaaaatggcaaagcttggtggtaatgttcatgccaaattacaatcagcaaaacaagcaactgtgagccttgatttttcagagcttaaagatagtgaaatcaatgctaaatacgctgctgaatttgcacatggtgctaatttacgtgaccaccgctttgaacaatacaaaaaagaacaagatacacatgtagttaactatactgttgatgttgaaaatttagaccaagcggtcaaaacccataagttactacaaaacattgaacaaggtgtctttttagcgcgtgacttaacctctgaagttgcaacagaaatgacgccgtctgattttgcaaaagccgcacaagagttaaaaaaattaggcgttaaaattaccgttttagaaccaaaacaaattaaaaaattaggcatgggtgcgttagaagctgttggccgtggcagtgaagaaggttcgcgtttagttgttgcacattaccaaggtaataaagacaccccaattgcattgattggtaaaggcattaccttcgactctggtggttatagtattaaaacaggtgcttcgattgcccgcatgaaatcagatatggcaggcgcagcagcagtactgggtacggttaaagcaatggcacttgcaaaagcagataccaacgtagtggctgtaatggggatggctgcaaatatggtatcacaattctctgtagcacctggtgatgttgttcgcacagctgaaggtttaagcgttgaaatagttaatacagatgctgaaggccgtttagtgctaagtgatgcaatgtggtatgcccgcgacaagtttaaaccaagtattatgattgatgtggctacattgactggctcaaaaatcggtgctgtaggtaatgaatacgcagcggttttctctgatgatgaccagcttgttgagcaacttacaattgcaggaaagcaggtaaacgagaacttatggcgcttaccacttggttacgaagatgcactaaaatcggatatcgcagaccttaaaaatattggttcgcatggtccaggtgcaacgacagcagcaagtttcttacaaaactttgccggcgatacccgttgggttcatatcgatattgctggtaatgcacttaacagcaaagctaaagatgagttagctgaaggtggcactggttatggtgttcgcttgttatcaaactggcttttaaacaacgctaagtaataacacatagtaatacgccaagcagctgtaatgattttataactgcttggcaatcatgagtttttctaattaacattaaacactcatttacatcattagcactcaccctatatgctaaatagtatcaagggataataataagattgacctgcaatgacgacaaaaagcacaccaaagattatggcgctcactacgcattgtatcttcttcgatgcatatgaaagtgctgagcatggcttaaatacacaaaaaaagatttgggcgctggctcaattttgccaatcgacgggagatttcgttgatgttgttccagctaataacaacttaactctgtatctaaaagagtctgaaaagctagcaagttggctgccattattgcttgagcagtggcaagagactacgactaaagattttgcatcaactcatcataagctacccaccgtatatggtggtcaacatggccctgacattgctcatgtagctgcagagcacaacttaactgttgacgaagtcgcgcagttacatagtagtaaaacctaccctgttttatttttaggttttcaacctggttttgcttacttagatggcttggatcctaaattatatacgcctcgtcgaagcgagccgcgcatctcagtgccaaaagggtctgtcgctattggtggcgagcaaacaggcgtatatcctgaaacgtcacccggtggctggcaaataatcggtcacaccgactttaaattattcgatattaatgcaacctctccctgtgctgttaaacccggtgataccttagagtttgttattcaggaggtgttaaaatgatcaccatcgttaaacctggcatgcaaatgtctatacaagatcaaggccgcgtgggtgctcgtcatttgggaattggccaatctggctgtattgatccttatgcgcagatcatagtaaaccgattagttggaaacgcagataacaatccagtcattgagatcacactaggtcttgctgaaattaaattcgataacgactactacattgccttgcatggaacagatatgaaatccagtgttaatggtaatgcgattgaaccaggctggagtttttacattaaaaaaggtgatgtgttaaagctaaatgccgcacggcatgggtttagaagctaccttgcaataggcgggcaatggcaactacctgaccctatattagattcctactcaacagatataacagctggttttggtggtctaaccggacaagcactgaaatcaggagacagctttgaggtaataccaaaatacaacactaaagttggtttaggtgcaatgctaccacctaaaagcacccaaatacgcatacatgctggtccacatgctgcagttttgcctaaagacaccatagttaattttataaatcattcatggcatgtatcacctaatagtaaccgcatgggtacacgattattaagtgatgagtgtagcttagagcatgatgtgtcattgccatcgatggctgtagcaccaggcagcattcagttaccgccaaatggagaaccaattgtgttattgaatgatgcgcaaacaaccggtggctatcctttgctaggaactgtgatcgacgctgatcttcgtcattttgcccaattaaagccaggtgattttttacatttcaagtttgttactctagcagatgcttttaaggcgaaagaaaagctaacagctcaccttaatcaattagccattgcgctaaaatacaaaaacaaatagttaatctgattagcaagtggcttgccacttgctttcttaaagctcccacttgtctatacatcttcgataaacaaattgaacaattagtttgcttaacgctacgcaccaaaatagtgcaagaaacaacacttttaatggcgctatttaccacttcaagccagcccatttgctcaaatcaagtatttaaattgctcacaacttaggcagtcatcccattttggtgcaaagcaataacacttggtgcatattttattctcaaatatttaaaaaagctgtgtgacttaggtaattatttctgttaaaacaaacattcgcagttatataaattctgttaactgcgcacatatttggaatgaggagtcactatgtgttcaatatttggggtattagatatcaaatctgatcccacccaattgcgaagtcaagcaattgagatgtcaaaacttttaagacaccgcggacctgactggtctggcgtatattcatctgataaagctattttagtccacgagcgtcttgctatcgttggtgtatcaagtggtgcgcaacctttatataatccagagcgcacacatatccttgctgtaaatggtgaaatttataaccacaaagagcttgcggcaaatctagaaacagactttaagtttcaaactcaatcagactgtgaagttatcttagctttatataaacaaaaagggcctgaattcttagacgacttgaatggtattttcgctttttgtttatacgatgaagaacaagacgcctacctaataggtcgtgaccatattggtattatcccgctttacacaggtcatgatgagcatggtaatttttatgttgcttcagaactaaaagcgctttcaccaatttgtaaacacattgaagagtttcctccgggtcacttcttgtggagcaaagatggtcaacttcgtaagtattacagccgcgattggcaaagctatgacgcagtaaaagacaacgaagctaaatcaagcgatgttaaagaaggcttagaagctgctgttaaacgtcaactaatgtgtgatgtaccttacggtgttctattatcaggtggtttagactcatcggttatttcagctatcacgcaacgtttcgccgcaaaacgtatcgaagataatgacgagtctgatgcttggtggccaaaactgcactctttctcagttggtcttgagggctcaccagacttagcagctgcacaaaaagttgcagatatgattggtacggttcaccaccctatccactttactattcaagaaggtattgatgctcttcgtgaagtgatttatcacattgaaacgtacgatgtgacaaccattcgtgcctcaactcctatgtacttaatggcgcgtcaaattaaagccatgggtataaaaatggtgttgtctggcgaaggtgctgatgagctttttggtggttacctttatttccacaaagcacctaatgcgcaagagttccatgaagagctaaaccgtaaagtgtctaaactacatatgtttgactgtttacgggctaataaatctatggctgcttggggtgtagaagcacgcgtgcctttcttagataaagaatttgtagacgttgcaatgcgtatcaaccctgaagcgaaaatgtgtaaagacggtaaaatcgaaaaacacattattcgtgaagcgtttgacggctatctaccagacgaagtgttatggcgtcaaaaagagcaattctctgatggtgtaggctataactggattgatactttaaaagagtatgtgagcgagcaagtaagcgatcaagaccttgctaacgctaaatataaatacccgattaatacgccagattctaaagaagcgtatttctatcgtagtatttttgaagagcacttccctggtgatgcagcggcaaaatgtgttccgcatggcaaatcagttgcttgttcaacacctgaagcgcttgcttgggatgagtcattccaaaacaatgctgacccttctggtcgtgctgctggcgttcataacgacgcttataaaaagtagtaattttgtgctgcaagccctgtgtttgcagcactttcctctcaattgaaataatttgttttgaaataatactgtcatcaaattattcctctgccgcatcaaattgttcacaattccaacaaaaaacgtaaaaaaccgcatttattcggctgtttagggacaaaaccatttacatttcttttcgaactcctacactaaagactaaactttggtacaaatttagttcgtctacaaactatttttcggtttcatccgtataaacagtgttagccgagatgtgccaaccggccgtttagctttctgctagatataactacaacaagaggtattcatgagcgaacatcatgataagtacagtatcgacaataccgactacaccgtcggtcaggacaatgtacaaaaatggggttttgatgtgcacaaccctgtatttggcattagtgctggtttaatcgcgctatttttagtggcaacacttgtgtcagatgctgaaacagcaaaaacaaccctgaatggaattaaaaacgacattattaataattttgatggcttttttatgtggtcagcaaacttattcgtattgttttgcttggcgttgattgtttcaccatacggcaatatccgccttggtggtaaagaagcgcgtccaactcactctcgtatttcatggcttgcaatgttatttgctgcgggtatgggtattggcttaatgttttggggcgtagcagagcctgtcgcttactttacaggctggtacgaaacaccactcggcgttgaagcaaacacaccagaggctgcgaaattagcaatgggtgcaactatgttccattggggtttacacccttgggctatttacgccgttgtttcgctttcgttagcattcttttgctacaacaaaggcctgccgttatcaatccgctctattttttatcctattttaggtgacaaagcatggggctggccgggccatcttattgatattctagctgtacttgccaccttatttggtcttgcaacgtctcttggtttaggcgcacagcaggccgcagcaggtataaaccatgtgtttggtactgatagcggtattggtctacaaatcggcgttattgttggtgttactctacttgcagtgatctctgttgttcgtggtatcgacggcggtgtaaagctgcttagtaatgtaaacatggttatcgcatttgtattactcgtatttgttgctctcgttggtttttcagcagcgtttggtaatcttcctaatactgttatgggttatgttgaaaacattattccgttaagtaacccacatggtcgtgaagatgaaacatggatgcatggctggactgtattctattgggcttggtggatttcatggtcaccgtttgtaggtatgttcattgcgcgcgtatctgaaggccgtacaattcgtgagttcttaattgctgtattactagttcctactgttgtgactatcttctggatgtctatttatggtggtattgctattgaacaagttattgataaagtaggtgtacttggtgagaaaggtttaactgatgtaccacttgcgatgttccaaatgtttgaagccctgccaatgtcgcaagtgctttcattcattgcaattgtactggtactcgtgttctttattacgtcatctgactcaggttcattagttatcgactctatcactgccggtggtaaagttgacgcgccagtgccacaacgtattttctgggcaacaattgagggtgcgattgcagcagcgcttgtttggattggtggcacacaagctatcgaagcattacaagccggtgccgtatctacgggcttaccgtttacctttgtattgctattaatgtgtgtaagtttaatccttggtctacgtacagagccaagaaactaaccactacctttaaataaaaaaacgctgctatatgcggcgttttttatttataagctttgctcaatgtatttaaattactcgtcataaagtctgtgctgttaagcacgctatatgagcaattcgcttagcggtgtatctgggcggtaatgataagcaatttgcgcttgtaacagctctgcggtggcaatggcatcgttcagtgcgttatggttttgatacgcaggtaacgagtaacgaatacgagaatccgcaagacgaacggaatcaagcttagaattaaacaacctacctagtaaaccttgttttgctctaagcgccctgctttcaagctccaacgtgtctattactgcaaactcaaggccttcacctaatcgcgattgcaacgcttgatacaaaaagtgtcgttcaatgggagcaaaatgcaccactatgactttaccttttaaagctgctagtaatggctccataatagatgaaaaatctggcgcatcacttacttctgaatgggtaataccatgaataacgatcgactcttcagcgagcttacgtcttggttgtacaatccaatgctggctatctttacaaaagatgcgcctagcattaaatggaattaaaccaacactgactatatcatcattttgaaaatttagaccggtcgtctcaaaatcaagcgccactaagggtacgtcgctaattggcatgtttaaatcacaaatagcggcttgataaaactcttgtattagcggctgtttgctagccgccaataactgctgataccgagtcggccaatcaagttttacaccttgtttagccattacttcatccctgtattggcagagtatctgaatttaaggaaattctgcgctttatctaaaatcgcaaacgcttctttaaggttgcgctgctcaaaaggcgatagtaaatgtggctcaagatcgttatctggggcttcgtctaacttttcaatttgccatgcttggtggcgaatacgaaccatcgcaatgtattctaaggcatctcgaagatcttgcgctttccctgcgggtaaaagctttgcttcgatgatatcttctaaacgctcgaatgaattttgtttacgactgcctattgctaaagcatgaacacgaattacatctgataatggcgcagtaccgcggcgttttaagttcatagaacgcttatgctgaccattatgctctagtacaaaatctttaaagaaacctaaaggcggtgttctgttacgggcattggctgcaaggttagccaagaaacgcttattcttacgcccttcagttgcaataaatcgtttgagctcatcagcccatttggttttaccgtaaacgccatctaaatcaaaaaagatagagctgtgtaataaagcctgtggttttggttctgccatccagcctgcaaattgctctttccactgctcacgagttaaacgccactttttaaatgacgccatgatttccccttcgcagtatttatagccacattcggctaaaccatcacagacaaagtcagcgagcttttgaaaatattcgtcatgtaattcctcgttaaagctattatcaaggataatggcgttatcttggtcggtaacaattaattgctcatcacgagccattgaacctaaggcaataaaacaataaggaatgggtggcgggccaaatttttcttcggctaaatcaagtaaacgctgtttaaaggtacgccctattacagccattgctgtaccaatcatatgagagttagcgtcttcgtttaccatgcgtacaaacacgttaggtagctgacgtgcataatgcgctaaatcttccacagattgctgagctaaaataccccgcactaacaataaactgctttgtgattcatatcgcaaaatgtcagataacgaaataacaccgatgggctttttcttaacaacgacaggtaggtgatgaatgttatctctgagcatagcaagtacagcctcaaacacataggcgttgctatcgagtaagataagatccgtttgcataatttgctcggcaggtgattcgtaacttaagccttcagcaatcacactggtgcgcaaatctcggtctgtaattatgccaactacttgaccatcgtcatcgtcaggatcatcactgatgggtttatcggcatctgttactaatacagacgataccgactcttgtgtcatcaattgggcaaccatttgcacagacgcgtcttttgctacggttactacatctctgtgcagtaatgatttaacctttgcagttgttaaatcattactgtcagcctgctctacaatggcctgatgaagacgcacattgccatcagcttcaaaaaagtctgcaaaggcttcgtattcatcacaatattgattaaatagctctacattaatgcaatacactaaggtgtcttcgagggccttggcaggaaatcggactttgcggttcatcagcaaacccatttgtccgaaaataccaccgacagttaagcggttatacaaatcaccatcgcgtcgatacatttcgacggctccggttctaattacatataaatcggcaatatcatcgccgtaattaaggatttgtgttcccgctctgaagtaggctatctctacttgtgaagcgagagtgttaaccgcttcttcgggcaaatcatcaaatggagcatgatcacttaaaaattgtgctatatcgacgtgttcggcttgcataagcgtacctagttttgagcttttccttgattgtgagtgtaatctgctattttttcaaagaaaaaatagcagatttaaatggattaagccttttctagttcttcggccagaagtttcgactcatcaccacgaggtttggtaaagcgcgctaaaccaagataaatcacaggtgtaaggtataatgtgaacagcactgctaatgctaaaccaccaaataccacccagccaatcgcgttacgcgcttcggcaccggcaccggtggataatataagtggtaatgcacctagcaaagtagacactaaggtcatcgcaattgggcgtaacctcacaagagcagcttcttcaactgcttctctaacactgcgacctttatctcgtaattggtcagcaaattccaccagcaaaatagcatttttagctattaagccaataagcatgaccaaacctatttgtgaataaatgttcaatgatgtacccgttagatacaaggccaaaatggccgatgtaatgccaaatggcacagtgatcatcactacaatggcactattaacactttcaaattgcgcagctaaaacaagtaatacaatcaaaaatgccaaaatataggtgatcagcacttcattagccgtttcttcaaaggtgagagcctcacccttgaaggctaaacttataccagctggcgggttttgctctgatatttcacggattttatttacaacttcggcaatggtaatgtcatctggcatttccatgcttaattcgattgctcggcgctgagcatggcgctctagttctgctgcaacaccttcttcagtaatggttgccacactgctcagtggcactaactgaccattacgacccccaacatataagtttgctaagtcacttggatttgtaatagtttggttttgtgcttgcagcataatagggattgattgatcgccgatgtttaaatcagcaatgtcatcgccgttaatggctgctctaagcgtaatagatatatcactgagcgatacgccgagctcttcagcacgacgtctatcaatattgacccgtaattgcggttgtgacggttggtacgagatacgaactggcgccacttctggcaaggctttttctatttctgccgagaaattttgtgccgctttaaagatctcaaggtaatcttgccccaataatgcaagctcaataccaccgccttgaccacgcaagttcaaactatttgaaccgcctgggtagccagccgcacctggaatgtttcctaaaggtccacgaattttattgataatttcttgctgactaaaatttcgttcgtcccaatgctttaacggtacagtgataaatacgatatttggatcccattgcccaacgacggtatatatagactcaatatctccactttcaacatagggcagcaaaatgtcttccatttgcactgcttgcctgtccataaagttaaggccgacaccatctgggccacgggcgaaaatgcgaattttaccgcggtcttctgtcggcaataattcattatctaaattgaaatacagcgcaccagagcctgcagcaacgagtaagcaagcaaaaaatgtaagccatgcatgtttaagtacaccatgaattgagcgtttatatatattcgctaaagcatgcccaacttttgcaaaaggatgaaaaccaccctgctttaatttaagttttgatgttagtgcaggcactaaagaaagcgctacaaagcttgatataatgacagctccagcaagcacaccaccaaactctctaaataatcgccctgctgttgaaggcaaaaaagcaatcggcacaaacacagctgctaatacagcggttgttgccactacagcaaaaaatacttcgcgggtgccaattacagccgcagctctgcggccaaggcctaagccacgctgacgttgaatattttcactgaccacaatcgcatcatctacaataaggcctgtcgctaataccagcgccaacaaagttaagatattaatcgagaaaccaagcgcccaaataagtgctaaagaaccaattaacgcaacaggtatggcaaatgcggggacgagcgttgctcgccatgagccaataaacacccaaagtgtgatcactactaacaacactgtcagtaatagagagtttattacttcatccactgagcttctaataaactgcgcatcgtcggaggttaaagtaaatttcatttcaggaaaacgtactctcatacgttcgattaaggtcagcacttcatcagaaatttcgatagtatttgattgagcttggcgtattatctccatgccaatcactggcgtcccatttaatcgcacgaatgaacgcggatcagctgggccaaaatacactgcagcaacatcaccaattcgggtatcgtcgcgcactataatatctgccacttgttcagctgatattgacgtagcatcggcacgaacaatcacctgttgatcgcttgattttaaactacctgcaggcacatcaaagggagcctgactaagtacattggcaatatctggtaccgtaaggttaaagctgcttagcttaagtgggtcgatgcgcactctaagcacccgctctcggtcgccatttaagcgaacatcggcaaccccaggaatagttaaaaactgcggggctaagtcaacatcaacgcgttcagtaagtgcttctaatgataagctgtcgcttgataccgttagcgataccaccgcttcggcatcgttatcagctttaataatagatacacgctctacttcttcgggcaattctcgctgtacacgggcaaccgattcgcgcgtttcgttggctgcatcatctaggttaacacccgggcgaaactcaaccacaatacgggcattattttcttcactttgcgcacgaattgttttaacaccacttacccgagcaacagccccctcaagtttactggttacctcggtatcaacggtttcaggcgagcccccaggaaacgatgctgaaacagtaatgcgtggcctgtctacatctggtagttcacgtatttcaataccagcaatagcggcaatacccgctatgatgattaacaaattcagcactacgattaatacgggccgacgtatcgccattgatggtaaatcttccatcataggttgctgtttcattatcactccttggcaagcgttgtttcattcataaaagtaagctcttggtttgggcgtaaacgttgcacgccttcagtaaccaataaatcaccttcttttaagccaccagataccaatagccgacctgctaaacgctgttcaattttaacatcaacacgtgtggcttttttatcaacacttttccatacgtaagggcccgcggctccccacatcatggcagcttcaggaaccactgcatgctcctcaccaagtaaattaatatgcacacgaaaactcataccaggcataaactgatgagattcattatttaactttgctttggttcttaaggtgcgcgcttgaggattaatacgagagtctaactgggcgacttgtgcgctgtaagttttgtcgcctagccaagggatcacttcaacagctgatttttcctttaaaacatcaattgctgcttctggtgcattaaagttaatgtacagtgttgatacatcatcaatcgttgcaatagcagtttgtgttgtgatccggtcgccaacttctacatctgttagccccatcacaccactaaacggagcacgaatttcgcggtcttcacgctctgtttttgcttgcatcaactgcactttcgcaagctcatgcaacgtttttgcatcgtctaaatcgctttgtggtacagcacctcgagcatggctttcttcgagccgcttcattgttcgctctgtgtcatttaacgttatttgtgcttctaaaagagcagcttgctgcctgcgcgaatcaagctcaagtagcaaatctccttttttgacattgtcaccgggtttgaagtgaacagcagtcaccctgtccccaaccgcagggtataaggttacagaacgcacagcttcagcactaccaactgcttttatttgttgttttgctttttcaaccgtaactgattcaacaactacgtttgcagcctcagcgactgatacgcaactaattaaggcaagaaaagtccatgcatgcaatttgccaattatcaaaagtgtcacctaaataagaatcgttttaattgttacgaagtgtaacagctttgtgatcaataaaaaggatgcttcgtttaataaacaaattgataagttaaaatgaataattagaaatacggcgctgattttgccgcatttctatctgtaatatcgcttatttaagtgagctattttcaggcaataaaaccttacagataactaagtcactttaaacgcatgtagcaacaggttttatccctcaaactggtttgtatgaatgcagattgatctcataaattaatacagttaactgcaggcacggtttttaaacgcgcttctgaggcaatagtcacttctacacaaccagaattaagatcaatttcgtccttttgaataacagaaaaacgcccttcttgctctgatctaagtgcgtattcaaaggcattgttgctgccctctgcaattgcagtaaaaagcccaccaataattgcaccagctaatgccccagcaaccatatcttcatgattgccatctaattcatcgataagccctattgcagagccaccaacaatgcctgttttgacattagatgacagttttacaggtttaacatcttcaactttggcgtaaaattttttaatcatgacctgctgatcggctctatcaacaccttgtgtcgcgcagccacctagtaataataagctcactagtagtttcttcatacccatttagtcctataatgtattgctgttaggtagaataataactactttgttcgtaagggactgtgagatatatgtaggtaagtgtaaaaaagcgcactaacttattactaggtaactcaactaaaaaatcctcggataaatcagagcttaaacactattgaagcaactatattatgtgtgttgctatcattaatttttgtattttcataatcaagtgttaaggccgtaccactagacaatgcataaccaatacctaccccggttaaaagtgatactccagagtctttttgatcaacaataaagtaatcatcagagaatttttgaagaaagctaaaattactatcccaaagtacactacctaaatgcgccctaacaaatacattgccagtaattgggtatgtaccaagtaaacgcagatcaagggcattggtttcaagccctccgctgtaaacagaatttttaacgaccgtaccactttgattagttgtttcgctatagacattaaattcggcttcgccaagcacactaaaacctgcttctattgctagatattgattaaattggtagccggcaaatcctctaaacccagttgctgtgtcactgtagtcataacgtaacggtaaaatttcttgctgctctatcaaggggataaaattaacatcgtaataatttttttgagcagcaatgccaatgtaaccaaatttattttcgttaagcgctgaatgagcaaaaaatggcattgaacacattgccaccgtaagtagtttgtacattgtatatatccttatacttcaaacgtttactttttaaaattaagaaaagatagtgttggagatgttatctaaaataaataatcggcagattgtacagcaataaggaacaaatggtagcttttatagcaattacagtgacttaataaacaaagtaactatatttaaaaagctaactaataaataatccataaaaaaaccccagactatgctggggtttataagaaatttgctaaaggttactgttggcgctgtgcttctttttgtgcttttttagcttctttacgtttacgaagaacttcttgcgcttcgttaccgatgtgaccttcaccgcgcgcttgtgctaattcgatttgcttttgacgctcagcaaagcgagcacgttgctcttctgttaggctgtcgtgacagtggtgacacgaaacaccttccatgtattcaggcttttgcttttcttctttagtgataggcatacgacaggcatggcattggtcgtaagagcctttttgtaaatcgtgatttaccgcaacgcggttatcaaatacaaaacactcaccttcccacatggtttcttcttttggtacttcttctaagtacttaaggataccgccttcaagatggaatacctcgtcaaaaccttgctctttcatatacgcagttgatttttcacagcgaataccaccggtgcagaacatagcgactttcttatgctttgctggatctaggttttcttttgcccatgctgggaattcgcggaatgtcttcgtgtttggatcaaccgcattttggaaagtaccaatctcgatttcgtaatcattacgcgtatcgataagaatcacttcagggtctgaaattaacgcgttccaatcagcaggcttaacgtatgtacccactacttcacgtgggtcaataccttcaacacccatagttacgatttcttttttaagttttaccttagtacggtagaacggacattcgtcatcgtatgactctttagtcacaatgttatctaggtttggttgtgcatctaaccatgcaagtaggttatcaataccttcgcgcttagcagaaacagtaccgttgataccttcagccgcaagtaacaaagtaccgcgtacttcattgtcttccatcactttaagtaatggttggcgaatagcttcaaaatctggaagggctacaaatttgtagagtgcgcacacaacaaagtgctcgctggttacattgtctttatgaacagcagtcatggttttaccttttgccttaaatgcccatgtggggcgttaaccgaatcgtaaatccggcgcattgagggcgcgtattttacgcgaattagcgataattgcaaaaactgatgcgaaatagctgtgtttttactgtctcctagcaaggcaagtacgttataatgaacaagatttactaaattttgctcatcggagattacgcattgcattttactgaacttgggattgatacacgcctcgaaaaacaacttgcgcatcaaggcatcacccagcccactgacattcaagctcacgcggtaccaacagctatcgcaggccatgatatttttgcacagtcaaaaacaggatcgggcaaaacgctggcgtttttattacctgctgtacagcgtgtaatgaaacaaaaagcactcagtaaacgcgaccctcgcgttttaatcgttgcgcctacccgcgaattagcaacccaagtatacagccaattaagacttttaattgcaggcacaaatataagtgcagtaaaaatactgggtggtgaaaactttaacgatcaaattaaagcacttcgtaaagacccgcactttgtagtgggcacaccgggccgtattgctgatcacttaagtcaacgctcgttacaactttcaggcttagagctgttaatttttgacgaagctgaccgtattctagatttaggttttaccgatcaagttaaaatgatcaacgaacttgctgatcaccgattacgtcaaacgttattgttttcagcaacccttgaccatgcacaagttgatgccctgtcacgtaacttattacgttcaccaaaacaaatactgttaagtgcttctaatgagcagcatagtgacattacccagcagctttatttagctgatcatctagatcacaaagaagcgctacttgagcactttgtaaaacaagacaatgtcggacaatgcattatatttaccgcaacacgtgccgatactcagcgtctaagccagttattaactgataaaggctttaaagcacaagcactcgctggtgacttaacccaagccaaacgccttgaaatcatggatgcctttagccgtgaaaactttaaaatcttaatcaccaccgatgttgcatcacgtggtcttgatttattaagcgtgacccatgtaattaactttgacctaccaaagcatgctgaagagtatgtgcaccgtattggtcgtacaggtcgcgctggctttaaagggactgctatttcgttagtaggcccgaaagattggccaagctacaaagcaattaaagcatttttaaatgatgaattaagctttttcaccgttgatggccttgttggtaaatttaaaggcctacgtgagaaaaaaccacaaacggtttggaataaagcagagaaaaaagtcgctgcaaagcctgctaaaccaaaacgtaaagctgcccctaaaaaaccgaaaacgcctattaaaccacctattgatgtcgatggtttttcacctatgcgtcgtaagaaaaaaccagaacaggaataataatgagcattcttggaacaacccaaacactattcgttaacgaaatgtcaaacgaaggcgcctatttagatggccgtgacttaggtgaagtatttttaccaagtaaagaaattgaatacgaacttgaagctggtgacagcgtgcaagtatttatttatttagatcatgcaggccacccaacaggcaccacaaaaaaacctttagctgaagtgggcgaatatgccctactccgtgttaaagcaattaatagcactggtgcgtttatggattggggtctcgaaaaagacgtacttgcgccatacaatgaacaaaagccaaaaatgaaagaaggcttttcgtatcttgtacgcttatatctcgataacgccagccaacgtatttgtgcatcaagcaactttaataagtttttatcgaaagaagaaccaacttactcaacgatggaagaagttgacttaatcgttgccggtaaaacagacctaggctacaaagtactcgtaaacgaagcccacattggtgtggtttactacaacaccgtatttaaaaagctatttgttggccagcgcttaaaaggctttattcaaaaagtacgtgaagacggtaaaatcgacgtactacttgaaaagccaggtatgggtaaagtaaacgacttaggcgaaaaaatcttagcaaaattaaaagccgaaggcggcgtacttcacttaggtgataagtctgacccagaagcaattaaaaagactttctcaaccagtaaagcaaactacaaaaaagccattggcggtttgtttaagcaaggtttaatcgagattgaagcgacgtcgattagattgaaataagttgcgagttaacaagatattgaattattttaaagagtaaggcgaaagctttactcttttttttcttattggttttattatctttaacatgttggcgtcgtaaattttctaacgctatattaagtattttcttttagaagtgaaagtaggtattgttccataagcagcctttgcgtttaacttatctctgccccattatgagataacgcaatactctaaggatctgttttgagcgatgagcgcattttcttttttgagtacctttagtttcaagaaaaatattatagttggcaatacattacgttatttgttaaaaatagattcattaatacatgcgcgcaatatcggcagaaagatgcgcgacgtgcgcactataaaatgttatgcatgaatggaggttgttatcaatggacgattttttgaaaggcgtttatgttagtgaaattaaaaaacaatgtgagtttgggttggctgcggtcaagtatttaaaccatgcattgaaacaggtacataatcaagagctatcaagagaagaaacacggttttaccattccgaagtatttagacaaattcatagtttattaacccatgccagtaatgtttctagaatgttttggcctccaatacctagacagaggcagaatgaaacagaccaaaactatgaaaatagactactgaaaatagacaaggtagtaagaggcagatccctcaagggtgagttcgggttggacgataatgacccattaaaaaatcgcacactacgtgatcacttggagcactatgatgagcgacttgaccattggcgaaacaatagcatcaatagaaatattgtcagcgatactattgggccgccaaatgcgatcgttggtccagcagagtcagatatgatgcgctggtttgacccaactagaaacgtctttaaatttcgaggtgaagaatacgaccttcagagtattgctacatctatagaccagttattacttcgttcgcgtaaccttgaagaagaattgaggaatcgtcgagtcaaccaagcataacaagcggctgttgtagccatgcaagcatggctgggacggcttttccgctgcttagcagctccaagccggccctatgccggccgtaacctaataaataccctaatgtgtttatgtccatcgactaattataaatgctccaaaatgcgttaacgtaaatgctctaaaggcctgcattaagcgatcagattcaatgttattcatctaatgctattggctctacttcacaatctgatattccactgacttttattctggtgatgatataaaaacttgtattaatatacagctcttttgttgtgcttccatacccaagaaaatgagcgacgagcgcatttttttttctgaatacctttagtgtcaataaaaatattatagttggcaatgcattacgttatttgttaaaaatagatttattaatatatgcgcgacgggcgcagtataaaattgttatgttgtaaatctagaatcgaggaagtatgagtacatctgtagaacaaaaaatgaatgaaatttatgaggacttttgcttcatacatgatcttcttgaagaagcgaaagtaaacccaacgacagactacgaaaagattaaccttacttatttccaaatattttgcactcattatgagtcgttcttcattctactaagatctaatcacttgagctctggcatcttacttatgaggagcatgctggagttatatgtaaaaagctattacttagagtttattgcaaagaacaaaaacgaagaagtaatggattatcttgatggtaaaataaagtacccgagtttttttgccatggttgaagaattaggtgagttcaagtctacttcaggagatactttcgataacttcttctctcaatttaccaaaagccaattggctagttacgaaaagttctcgttttttagtcacggtagtggagagtatataaaatttttctacaagcatggaaaggttaatttttctcgcgaacaaatttccgatgtaatagaaacagcgaaaggaatatttctaacttttgctatgttgctatttgctgtgcaagaaaaaatagctcagctagggaaggtgttggaaaaattcatttccgatgaatctaaaacttaacaatcgcaatcaaacgggaatattttccattccttgttttgcggttttcggtacgctaccgcaaaacaatccactacaaatgagggcgttaccaatgcctttcttttatacagagccgaccttcggctctaactcatttatgtccatcgacgagttataaataaaactagcctttgccccaaagtgagttagggtctcaattgagcgagaagatgctccttgttgtgcttcaatgaaaccggacactaatttaggtggtattattaccactcaaacagaggtgttttatgacaaaacaacgtcgctctttttctcaagagtttaaacttaattcagcaaaattagtccttgatgatggatactcatttccagaagccgctcgttcactagaagtcggtgaaacagcccttcgacgttgggttaagcaattacaagaagagcgtggtggcacaacaccaaattctaaagcgcttactcctgagcagcttagaattcaggagcttgaagctaaagttaatcggcttgaaagagaaaaaacaattttaaaaaaggctactgctctcttaatgtcagacgagataaacaatattcgttgatagaccaattaagtgagcatgagtcagtggaaatggtctgtagcgtattgaatgttccgcgttcgagttattacgattttaagcagcgtgtgacatcaattaaacttgaagaggtgcagcttagatcaacaattaacgagttattttcactcagtcgtggagctgctggtagccgcatgttgacggtgatgctaaaagacgctgatttaactgtaggcgtttttaaggtacgccgtatcatgcgtgatatggggttggtctgtaaacaaccagggcctcattcatataaattagcgacggcggaacgaccagatattccaaacaaacttaatcgtgagtttaaagtaaatagcgcaaatcaagtttggtgtggggatatcacctatatttggacgggtaaaaagtggtcttatttggctgttattatcgatttgtttgctcgccgtgtggttggttgggcgatgtctgataagactgacactgacttagttattaaagcattagatagggcttacgaacaacgaggcaaaccatctggactgatgtttcattcagatcaaggtagtcagtacaacgcaagaaggtttcaacaaagactgtggcgctaccggatagagcaaagtatgagtcgccgagggaattgttgggacaatgcgccaatggagcgtctatttagaagtttaaaaacagaatgggttccctcattaggttatagtaattatcaagaagctgaaaaagatattagtaattatttgatgaattattataactggcacaggccacatagccataatcaaatggttgcccctgctatagcagaagaaaaacttaattcactgtccggaattagttgaccacaacaccttgatttggcgaggcttccccttgcttttttaattttggcaatatcttcatgccaagaaagagtgaattgcagaggctcgggttctatccttataggcttcttttttgcaaatttctcgtatagtcaggaaaacgactgaatcgctcgtagattaagattgtagaggtacattgagtgtcgcgtgacaacttaatctcattagcaattattttgagttatttctcggcacatcagatggggattctggctattggagtaattatagaggcaccattgttattcactgccactctaatgtcgatgtttttaaaaattatattaggcaacacatatatcttaaatttttactattggctcaaaaaaatggagctacaattttttagctgtttcttgctggcactttttatacgttatgtttgtttttagctgtcgttttaacaagtgatttcacacttgaaaaaacggtagcgatattaagtttggggctcttttaagtttatttgcctcgaaggtagcgatgaagcatgttgtacccctaataaattaattaaacaatgaacgcaaaacagcaggctagcgctcattcttcgcttagtttagcatggtttttccattgtttattaatgcattagcatgctaattgctgatgaacttaggttgcttggcaggattttaaagttatttattcgatgaatgttttggctgacaattttgttagccaaatttttatgtattgagttatattggcctgattaaaaaattattttcaatggagagagaatatgggctttttaccagactggattgatacatttatcactaatgtgtcccgtgagttcgacgccaacaatcagcaattttcgcgcccagtaaaaagaggtactgttctaagagtcgaaaaagatgaatttctaaaaccttactatttccactttgggatttatgccgggaaaggaaaagtaatacacttttcacgcggagaaattagagaagatgagttggatgtgtttcttgaagacacagggatgttgaattctgacatcgatattatgtattttgatcctgaatactcatccaagtacacacttgaacagtcctatcgtagggcaaagtcaaagcttggaaagagagattaccagttgctgaaaaataactgtgagcattttgctgtgtggtgcagaacaggtaaggcagtgtcagctcaagcatttggttctaaatcaaatcattacacagcgaatattgtcgaaattattagctatttttataatgagctaggaatggatgtttctagaagggtatcaattgacgactttgattaatgtaactctatgacattgagcttgccaaaccgggacattattggcccatataatacggttgttatatacagtggtgttattaattgttcgttaagtatttggggctagctcttccactgtgcatgatgtgcgttttttgtgtctacttttgatacatagccgttcttcagctctaaattgtttctgtccaaaaacgagtttgttctagcgtctgattctcgcttgaaaataacctagattatttttttttgaattgccaacaaacaaaaagagcattgtatctagcgcgatataaatcacgctcacaatgctctttaaagactagtttaaataacgaggttattttagtgagtcgttaatttcttttagtgttgcaactgggtctgccgattgggtgattgggcggcctacaactaaatagtcgctaccatcttctacggcttgttttggtgtcatgatgcgtttttggtcgcctgcatcgctgcctgctgggcgaataccaggggtaaccagtttaaagcctgcgccaagttctgcttttagctttttcgcttcttgggctgagcacactaccccatcaaggcctgattctttggcaagttttgctaggtaaattacttgctcttctggcgttttatctacacctaaacgaataagctctgcggcatccatactggttagtacagttactgcaatcagtaatggtgcgtcatcaccaaactgctctaaagcttgttttgctttggtcatcatttcaacgccaccagaggcatgcacgttaaccatccatacacccatttttgcagctgcggttacagctttagccactgtgtttggaatatcgtgaaattttaggtctaagaatacatcaaaacctaagtcgattagttccttaacaaagctaggaccaaaatacgtgaacatttctttgcctactttaaggcgacacgtatcaggcgataattgctttacaaacgcaagagctgtttgttgatcatcgtaatcaagggcaattaatactttttttgaatcttcgacagacataactttcctaaaaactaatggactaatatgaattaaaaaccgtctatgccacggcttggaacaattgtttcccagtgcttacacgatggacatacccaataaatggtatgactggtaaagccacagtgttggcactgaaaatcgggtttagttgcaatataagatgttactagcttatcaatttgatcgagtacatctttaatatcgttgttttgtttggcaagtagctgtaataaaaagctaaagccacgaatagtcggatgacgctttaaactatccgttaaaaatttaattgcttgctcaatatggccttgttcaagtaaagcttggcaatgttttatttttattaatacaccacctttatcgagcaactcgttgagtaactcatgaaattggtgggttaagtttaatttttgataactaactgcaagctcttcaataaataccggcgcaaaaaatgtaaattggctaataagctcgcgccaataataaattgcttttacataatcttcattggtaaaggcactgtggccaagctcatacaatgggcgaatggctttatggtttaagcttatggctttacgcataatttgcgtatcgttatcttgtaaggctgcttcgcagtaaaaattagcaatggctttcacatgctgaggtttagtaaataaatcactgtgtgcctcgaacatgttaatgcccttttcccattcacgtgtttgtgaataaaggttaataattggctctagtgcctctttatgccccgcctttacaagccacactaaatgctcttctgcgccgtctagcaaacctgccataatataatcttcagcaagttctagacgactcgttgcagcttgttgttcatcaaggcttggatgttttaatagcagctcatgaattttaattgcgcgatcaagctcgccgcggcggcgaaacatggtggccaatgttgaataatgctcaactgagtcagctgcaacttcgagtagattaataaggtgttctaagccctggtcttcttctctgtctaagagaaatttaaggcctttagaatattcagaggtaatttggcggttaagctgatgagcttggtttttagcgctgtttttgcccattatccaaccgtaaccggctgcaacgggtaaaagtaaaaacagaagctcaatcatgattaggtgtctttattagcaacaagctttttattgtttttttcaggcgctaatttcttctttaagcgataattctgccactttaactgagaaaacagtgtaaagcttataaaacaaccaattgcgacacctaaaataaagcagatacttattacaacagctaggggtaaggtattactggcgattaaataattgatttgcaccagttgtggattctgtgaaccaagtacaaacgcaataaataaacacagcgcaattaatacaatttttaataccctaaacaagtaactactcctgtgtaaaactaggcaatactcgcatttacgcggtcacgtaattctttacctggtttaaaatgtggtacgtgcttaccgtctaactcaactgtttcgccagtctttggattacgacctgtgcgaggagaacgataatgcaatgagaaacttccaaagccacggatctcgatgcgatctgagctagataatgagccggccatttgttcaagaatttctttaacggcattttcaacatctttcactgggatgtgtgcgtgttgctcagcaagttgttctatcaattctgacttagtcatagcgtttccttaaagagtggtaaaggaagggcaaagctgcccttccaatttaaaaagactagatattagtctttttgagcatttttgaatgctgcagccatagcgttttcgaacgctggctcttctttcttaagcttctctagtacttctttctcttctgcttcaaaaagagctttaacagataagcttaaagtgcggttcttacgatcaacaccaacgtatttcgcttcgatttcgtcgcctacagaaactacagtagtagcatcttcaacgcgctcttgagcgatatcagctacacgaatgtaaccttcaacgccttcgattagctcaacagttgcgcctttcgcatcaacttcagtcactttacctttaacaatagcaccttttttgtttgcgtccaggtagttattgaatgggtcagcttcgatttgtttaacgcctagagagatacgctcacgctctgggtcaacttgtaatacgatagcagtgatttcgtcgcctttcttgaattcacgtacagcttcttcgcctggtgtgttccaagaaatgtctgaaaggtgaacaagaccgtcaataccgccttcaagaccgatgaagataccgaagtcagtgattgatttgatcttaccagtaacttggtcgcctttgttttgtagacgagcaaattcttgccatgggttagcaatacattgcttaagaccaagagaaatacgacgacgctcttcgtcgatttcaagaaccataacttcaacagtgtcacctagtgaaacaacttttgaagggtggatgttcttgttagtccaatccatttcagaaacgtgtactagaccttctacgccttcttcgatttcaacgaaacaaccgtagtcagtaaggttagttacacgaccagaaagcttagaaccttctgggtaacgaccagcgatagctgcccatggatcttcgccaagctgtttaaggcctagagatacacgagtcttttctttgtcgaatttaagaactttaactgcgatttcgtcgccaacattaacgatttctgaagggtgcttaacacgcttccacgccatgtctgtgatgtgtagtagaccgtcaacaccaccaaggtcaacgaacgcaccgtagtcagtaaggttcttaacgatacctttaacttcttgaccttcaacaaggttagcaagaagctcttcacgctcttgtgagttttctgattcgataactgcacggcgagaaacaacaacgttgttacgtttttggtcaagcttgattactttgaactcaagctctttaccttcaaggtgagttgtgtcacgtactggacgaacatcaacaagtgaaccaggtaggaaggcacggattgaatcaacttcaacagtgaaaccgcctttaactttaccgttgataacaccagtaacagtctcttgctcttcacatgctttttctaagcggatccacgcttcgtgacgcttcgctttctcacgagaaaggatagtttcgccgaaaccgtcttcgattgcgtctaaagcaacatctacttcgtcgccaacagcaacttctagttcaccagcagcatttttgaattgctcagcagggattgcactttcagatttaagaccagcatcaacaagtacgatgttgttctcgattgagataactgtacctttaacgatagagccttgctctgcttcaaaaccctttaggctttcttcaaataactgcgcaaaattttctgacattatacgtctctaaataattaaataaccaattagcaaaccatgctgcatggggttgttaaaatcgcgctagcatcctgccggcaccttataaatttactttttagcttttggaagctttcctgcaagtactgcttcgtcgagtaaagttactactttatcaaacacttgcatcgcatcaaaatcgctagtatcgatttcaatggcgtcttctgcaggcactaatggcgcaacctcacgtgtcatatcacggtgatctcgcgcttttatgtcctcaagtagaccacttagtgtaacatcaagaccgcgttcattcaactcagcaaagcgacgacgtgcgcgctcttcagctgtagcagttaaatatattttcaacggtgcatcaggaaacacaacagtgcccatatcacgaccatcagcaattaagccattttctgtacgaaatgcacgctgacggcgtaataatgcttctctcactcgtggtaaagctgctattttcgatgcagctgcacccacttcttcattacgaatcgtggttgtgacgtcttcgccttccaacacaattttcgatgtgtgagtgtggctatcaaccaaaaactgcacatctaagtttgctgcaagtggtactaatgcatcttcattatctaattcaatctgatggtgaagcgcagcaagtgacagcacacggtaaatcgcaccgctgtctaatacatcccaacctaatttctcggctaacaagcgacatacagttcccttacctgaaccgcttggaccatcgatggtgattacgggcattgataacgcctgcatttataacctcctgcaatgcacaccaaaataaaaccggaatattatacgccagttattaaaatagatccgcacttagagtgtaactttttatattttcttctgttttattgacttgagacagactctagaactttgaaaaatgtaggaaacgttttatacgtacacttaggatcgttaatggttatcggcttgccacccactgcaaccatcgcaaaacacattgctatacggtgatcgttataggtatcaatcgcaacatcattaaatgtgtcaggtggagtaatttcgataaaatcttcaccttctacaacctctgcacctacttttctcagttcggttgccattgcatataaacggtcagtttctttaacacgccagttatagatgttacgaatcgccgttttaccctttgcaaaaagtgctacagttgctagtgtcatggccgcatcaggtattgcgttagcatcaatatctacagcattcagctcgcctttgcgaaccaccagcttttcatcgtaccaatcgatttttgcgcccacttgttccataactttggcaaagccaatatcaccttgaacagacgccgcacctaccccattaatttcaatttcgccgcccgctattgcagctgcagcaacaaaataagaagcacttgatgcatcaccttcaaccataatacgctcaagtgcttgatactgctgacagccttttacataaaacgtttcgtagttatcatggcttacagtaacaccgaaacgcttcatcacatctagggtaatatcaatgtaaggtttagataccagcgtgcctttaatggtaatttctgtgtcgccattaaataacggtgctgccattaatagcgctgttaaaaactggcttgaaatactgccatcaatggctactttaccaccattgattttaccgcctttaatagccagtggtggatagtcgttattttttaagtaagttacatcaccacccagtgcttgcaatgcatcaaccaaatggccgattgggcgttcttccatgcgtggctcaccaacaagctcatactcaccttcaacagcagcaagtacagctgttagcgggcgatatgcagttccagcgttacctaaaaataacggttcagatggtgtattaaatttacccgctacaccctcaacagtcgccactgttttgtcttcattaagcgtaacattaacacctaataattttagtgcgccaagcatatgacggatatcgtcgctatcaagcaggttttcgaccactgtcgtacctttagcaagcgcagctaaaagtaaaatacgatttgataagctttttgagccgggtaaggttacgctaccattaacttttgcaataggttcaagacgtagttgttccatttaactattctcctttgcaaacttagccataaaatcaaccaaggcttgcacgccttcaagtggcattgcattgtaaatacttgcgcgcataccaccgacaatacggtgaccttcaagggctaataagcctgcttcttttgactcactaatgaatttatcattcagcgactcatcatttaaccaaaacggaacgttcatacgcgaacggcaatgcttagcaactttattgctataaaaatctgagctatcaatataattgtaaagtagctcggcttttgcgatgttttgctcttccatcgctttaacgccaccatttgcttccagccattcaaacacttcagcggctaagtaccatgcaaatgtcggtggtgtgttgtacatgctgccttgtttcgcttctaatgcgtaatcaagaatacccggctttgcaagaccttcacgttcaagtaaggttttacggataattacaatagataaaccagatgggccgatattcttttgcgcaccagcgtaaataagatcaaactgatttacatcaaattcgcgcgataaaatagtcgacgacatatcagcaacaatcggtgctgatgggtgtgatggtacgtcaaaaatttcgatgccatctacggtttcattcgggcaatagtgaatgtatgacgcatcagcaggtaattcccagcagcttgcaggcttaattgaaaactgaccattttgctgttcatcatcacgtacgttgatactttgaactgtggtgaattttgccgcttcttctgttgcacctttcgaccacacgccattttcacagtaaatagctggcttaccatcaaggtgaagattcagtggcacagcactaaattgaccacgaccaccgccatgcataaataatacttcaaactcatcgctaatattcattaagcgacgcaggcttgcttcacatttagcagtaagcgctaaaaagtcgctgctgcgatggctaatttccatcacagatacacctaaaccttgccaatcaataaattctttttgtgctttttgcataactgccggcggtagcattgccggtcctgcacaaaaattatatttagtcattactttgcctcattccagtaattatagtgcggataaaaaaagcggccgaagccgctttttaaatcaatgttattctgaaggtgggttatcacccgcttcttcaggattagtatcgactacttcaacggcctcgccttcgatggctgcaagctcatcaacttcgatttcttcgatacgttgtaaaccaactacttgctcttcgtcaatagttcgtatcaaaataacgccttgagtattacgaccaaccgtagaaacctcatttacacgagtacgtacaagtgtaccgcgattagagataatcatgatttcgtcgttttcatcaacctgtactgcaccaaccacagcgccgttacgttcgctaactttgattgatacaacaccttgtgttgcacggctcttcgatgggtaatcttcaagtgctgtacgcttaccgtaaccattttctgtcacagttaggatggcaccatctgatttaggaacgattaacgatacaacgcgttgatcgtctgccatcttaataccgcgaacacctgttgctgtacggcccattggacgtacgcctttaaagcggatttccgggttaccgttttcatcaagtactgggttgccgttttcgtctaatacttcagactcttcagcttctttaaagcgtacaactttaccagcatcagtaaatagcatgatttcattcgtgccatctgtgatatcaaccccaattaggctatcgccttcattaaggttaacggcaatgataccgctcgcacgttggcggctataagctgttaatggtgttttcttaactgtaccaaacgcagtagccatgaagatatatttatcttcttcgtactcacgtaccggtaagatagcagtaatacgctcatctgcttcaagtggtaataggttaacaattggcttaccacgcgctgcacggcttgctaatggtaactgatatactttcaaccagtataagcgccctgcagttgagaagcacagaattgtatcgtgtgtattagcaaccaatagacgctcgatgaagtcttcatctttcatcttcgttgctgacttacctttaccaccacgacgctgtgcttcgtagtcagataatggttgatacttaacgtaaccttcgtgagaaagcgttactacaacgtcttcttcattgattaggtcttcaaggctaatatcgtgagcagcagcgctgatttcagtacgacgctcatcaccatattgttctttaatttctactagctcgtcacggataacttccattagacgatcagggcttgaaagaatgtgtaaaagctcggcaattagatcaagtaacgtttggtactcgtctaagatcttctcatgctcaagacccgttagtttgtgtaaacgtaggtcaagaattgcttgtgcttgttgctcagataaatagtattgaccatcacgaatacctaaatctgcagctaaccaatcagggcgagcaacgttatcttcacctgctttttcaagcatagctttaacagtgcctagctcccaagggcgagctgttagtgccactttagcttcagcaggtgttggtgacttacgaattagttcgataattgggtcgatgttcgcaagagcaattgctaagccttcaagcgtatgagcacggtcacgggctttacgtaaatcgaatactgtacgacgtgtaacaacttcacgacggtgaatgataaacgcttcaagcatttctttaaggttaaagcacttaggttggttgttatcaagtgcaaccatgttcataccaaacacagtttgtaactgagtttgtgcatataggttgtttaagattacttcaccaacatcaccacgtttgatttcgataacgatacgcataccgtctttatctgattcgtcacgtagtgcgctaataccttcaattttcttatctttaactaactcagcgattttttcgataagacgcgctttgttaacttgataagggatttcgtgaacgatgattgtttcacgaccggttttttcgtcaacttcgatttcagcacgagcacggatatatactttaccacgacctgttaggtacgcttgctcaatgccttttttaccgttgataatcgccgcagttgggaaatctggacccgggatatattcaattagatcagcaattgacatatctgggttttgaataagcgctaaacagccgttaataacttctgttaagttatgcggaggaatgttcgttgccataccaaccgcaatacctgatgaaccatttactagtaagttaggtactttagtaggtaatacgtcaggaatttgctcagtaccatcatagttaggtacgtaatcaacggtttctttttctaagtcagctaataattcatgtgacattttcgccatacggacttccgtataacgcattgctgccgcagagtcaccgtcaacagaaccaaagttaccttggccgtcaacaagcatatagcgtaatgagaaaggctgcgccatacgaacgatggtgtcatataccgcgctgtcgccatgtgggtggtacttaccgattacatcaccaacaacacgtgctgatttcttgtaaggtttattccaatcattattgagttcgttcattgcaaataaaacacgacggtgaactggctttaagccgtcacgtacgtctggcaatgcacgtccaacgattacactcattgcgtaatcaaggtacgaattttttaattcatcttcaatattgactggcagaatttcattggcgagatcagtcatttgatttcacattccttcagtattgactcataaagaggcacaatgccgtcttaagagctttagttattatttccagaccatgctatcacaatttatttagatttacaggcgctaaatctttgcgatttagtaatttccccctatataatggcctcagattgacgaggaagttttttatgaccgaacatcaaaatgtagataatgcagaaattgcaaagtttgaagccatcgcagaacgttggtgggaccgcgacggagagttcaaacctcttcatgaaataaatcctcttcgcttggattttgtcgccgataaagtaggcggcttatttgataaggaaaccttagatgttggctgtggtggcggcatcttaagtgaaagcatggcgcgcatgggcgctaaagtaaccggcatcgatatgggccaagagccactcaccgttgctaagttacacagtttagaaacaggtgtgcctgttgactatataaaagtaccagcagaacagtttgcggctgagcaccctgctcgctttgacgttattacctgtatggaaatgcttgaacatgttccagatcctgcgtctattattcgtgctgtagcagaacttgctaaaccgggcgccgatgtcttcttttcaacactaaacaaaacaccaaaggcctacttgtttgccattgtgggtgcagaaaagcttttaaaaatggtgcctgaaggtacccatgaccataaaaagtttatcaaacctgcacaacttattgcctgggcagaagaagcgggattaaaagtaagagccagcacaggcctgaactataacccgttctctaagcagtacagtttaaatgatgatgtaagtgttaattacatcctgcactttgagaaattagcctaatgagtggtgtaaacgcaccctctatcgattttgatgcttttatttttgatctcgatggtacgctccttgataccgccgatgatctgggtcatgcattaaatcgtgtattagccgatgcagatattgccccagtcgctgaacatatttatcgtcctgcagcttcaaacggagccaatgcattattagagattggttttggtgataagtggcctgatgtagaacaactggctttacgtcaacagttactcgattattacgctgatgatattgccgtacacagtaaatgcttcaacggcatcgagcagcttttaattgcacttgagcaaaacaatattaagtggggcattatgaccaataagcccggctttttaactgagcccttagtgcaagcgatcccatctttaagcaatgctcaagccgttgtcagtggcgatacattagctgtttcaaaaccatcaccggatccactgttacatacagctgagatcttagcggttgatccaactcgttgtttgtatatcggtgatgctgagcgagatattcaagctgcaaaagcagctaatatgtacagtgcaacggcgctttggggttacataccgagtgttgacgctgcgcttggctggcaggcagattttaattggcattcgccaattgatggctttaaccatatatagtgttatttattatctaaaacaccatatattgtgatctgattcacttttgaacattctttgatgataaaaaaatcagtcgaaatttattttttaaaacggtaaattttctggatcttgagttgatttctacaaatttcgtcgtctgtgaatgttcaaaggttaatggtcactaacacaatgcgcttatccaatagttatccacaaaatggggcaattctatcccttgcaaaacagcgcagaccacactatcttgtgatctgcaatttaaacaacaccagatattgtggctaaatgttattcaattagctgcatatagtgtttaataataataattacataaagaatacctttgtctttacaactaaaatttcccaaggaatacaggcaaaactatgaaccaacagctatctgtaagcaaacgtgacggccgtaaagagtcactcgatctagataagatccatcgcgtaatcgcttgggccgcagaaggtctgaataatgtgtctgtctcacaagttgaattaaaatcacatattcaattttatgatggcattcgcaccgacgacattcatgaaacaatcatcaaagcggcagcggatcaaatctcaaaagatacgcctgattatcaatacctagctgctcgcttagctgtattccacttgcgtaaaaaagcgtatggccaatttgagccaccacgtttatatgatcacattacaaaattagttgaagacaaacgttacgatcagcatttacttgtcgactacacagagcaagaaatcgatgagttagactcatatattgatcataatcgtgatttaaacttcagctacgctgctgtaaagcaacttgaaggtaaatacctagttcaaaaccgtgttactggcgaaatttacgaaagtgcacagtttttatatattttagttgctgcaagcttattctctgattatccaaaagagacacgtcttgattacatcaagcgtttttatgatgcagtgtctacatttaagatttcattacctacaccaattatggccggtgttcgtacaccaacacgtcaattcagctcatgtgtattgattgaatgtggtgatagccttgattctattaatgcgacatcgtctgcgattgttaaatatgtttcgcaacgtgctggcattggtattaacgcgggccgtattcgtgcccttggtagccctattcgcaatggtgaagcttaccacacaggttgtattccgttttataaacacttccaaactgcggttaaaagctgttcacaaggtggtgttcgtggcggtgcagcaacgttgttctacccactttggcacttagaagttgaaaatcttcttgtccttaagaacaaccgaggtgttgaagacaaccgtgtacgtcatcttgactacggtgtccagttcaacaaattaatgtatagccgtttaatcaaagacgattacatcacattgttcagcccgtcagatgtaccgggtctatatgatgcattctttgaagatcaagcgaagtttgatgagctatatgttaagtacgaacaagacgagtcaattcgtaaaaagcgtattaaagcaattgagttattctcaatgtttgctcaagagcgtgcaagcactggtcgtatttacttacaaaacgttgaccactgtaatacacacagcccgtttatctcgactgtggcgccaattcgtcaatctaacctatgtttagaaatcgcattaccaactaagccacttagcaatgtaatggatgaagaaggtgaaattgcactttgtacgctatctgcatttaacttaggtgcgattgagtcgcttgatgagttagaagagcttgctgaacttgcagtacgtgcccttgataacttacttgatttccaagactaccctgttcctgcggctaaaaacgcaacgatgggtcgtcgtacgctgggtataggtgtaattaacttcgcatactaccttgctaaaaacggtaaacgttattctgatggtagtgctaatgccttaactcacaaaacgtttgaagcaattcaatattacctaatgaaagcatcaaacgagttagcgaaagaacgcggtgcgtgtcctaaatttaacgagacaacgtattctcaaggcatcatgccgacagatacttacaagcgtgacctagatcagttctgtaatgagccacttcatttagattgggattcattacgtgcgagcattaaagagcacggtatgcgtaactctacgctatctgcattgatgccatcagagacatcatcacaaatctctaacgcaacaaatggtattgagccaccacgtggtcatatcagcgttaaagcaagtaaagatggtatcttaaagcaagtagttccagattatgaaaacctgaaagacaactatgagctactgtgggatattccatcaaacgatggttacctacagcttgttggtattatgcaaaaattcgttgaccaaacgatttctgcaaacactaattatgatccatctaagtacgaaggcggtaaagtacctatgaaggtgctattaaaagacctactgactgcttataaacttggtgtgaagaccttgtactaccacaacacacgtgacggtgcatcggatgctcaagatgagctaacaccagaggtagaagatgacggttgtgcaggcggcgcttgtaaaatctaattaaattaataacataacaaaagcgggctcatttgcccgctttgtcctgactgttttttgagaaatcactatgtcatatacaacttttagccgaaaccataataaccaattacaagaaccgatgtttttcggccaaactgtaaacgtgtcacgttacgaccaacaaaagtaccctatcttcgaaaagctaattgaaaaacaattatcgttcttttggcgtcctgaagaagttgacgtaagtaaagaccgtcttgacttccaagcgttaccggaccacgaaaaacacatctttttaagcaacttgaaatatcaaaccttgctagatagtgtgcaaggtcgttcacctaacgttgcgttactacccattgtgtctattcctgagcttgaaacttggattgaaacatgggcgtttagtgaaacaattcacagccgttcatacacgcatattattcgtaacgttacgcagtctcctgagcttatctttgatgatatcgtcagtaacgagaagatcagtgaacgtgctgatgcggttaccaaatactacgatgatttaatcaatatgatttctgtttacaatctatatggtgaaggtaaacatgagatcaacggtgaagaagtaaaagtcagcttatttgaccttaaaaagcaactttacctagctatgatgtcggttaacattctagaagctattcgtttctatgtaagctttgcctgttcattcgcgttcgcagagcgtgagttaatggaaggtaatgcgaaaatcatcaagcttattgcccgtgatgaagcgctccacttatctggcacgcaacacattctaaatatcatgcaagaaggcaaagacgatcctgaaatggcaatcgttgctgcacaatgccgtgaagaagcgattcagatgtttgttgaagctgctgagcaagaaaaagattgggctgaatacttgtttaaagatggttctatgattggcttaaataaagatatcttatgtcaatatgttgaatacatcacaaatgcgcgtatgacagcggttggcttacctgcacagttcgaaagtaagagtaaccctattccatggatcaactcttggttagtatcagacaacgttcaagttgctccacaagaagctgaaattagctcttaccttgtaggccaaattgattctcaggttgatgcatcagattttggtgacttcgatctgtaatgagcactaacactactgcagaggttatccttgcaggaacaaacagccagagtctcaaatttgattctggctgttcatctctccttgaatgcctagaacaacacaaaatagatgtcccctaccaatgccgtgaaggttattgtggcgcatgccgcgctaaattagtcgaaggtgatgtgagttataaccaagaaccacttgcgtttgtacgctcaggtgaagtgttgctgtgttgtagtaaacccaacggtaaggtaaaaattgagctttaatgccacacaagatcgtttgtttggtagaagttttctttgtctgagacactcactgtttgttgatctatcgttacatcccactgtaagtttttagtcaaatggcttgccaattgctcaataaagtttccatcaaaggcaattaaatggctgttatttatcagctctaattgatgctcatattcttgtaaccactcattgtttagcgtagttacaacccatagttcgtcgacacgtttagcaattttactcaatattgtaaaatcaggttctccaactgctagccacatttcataatgctcatcaagggctttaattgacacatctggctcactacttttaagccgtgcgttcatggttgccattttattatgagaaaataagcagtagcttaaaagctttaacacaaaatgttcatagctttcttgcctatcacatgccgtggtgaaaacctcttggtgatttcgctgttcgcgcaaatctgcaatagtaaaattggctttaaaaacacgattcttatcagacataacgaatgtccatctaactgaaacattctaagtatagtttacggtgtaaaattcgcgacttagttaaaagttatagtataacgttattgcagataaaaaattgcagtgttatattatatcacaacactcaacaacaaacttagaagtagtaataatgaagcaaatttcaattctttctagtgctgttgccgctgcgctgttctctcaatcaacaatggctgctgtgatcacaggtcaggtattagataaaaatcagcaacctatcagtaacgctgaagttcacgttcatggtaagtcacaaagcgttgtcactgacaaacaaggccagtttaaaatcgatgtggataacaaaggccaattacacatcagcaaagatgattttatcgataaacgtgttgaaattaatggtgataatcaaaatctagttattactctcacgccaacatcggtagaaacagttgttgtctatgcttctgcgcttcataaaaatagtcttgaaatgatctcacccgttaacgtattggctggtgataatcttaaaaataaggctaagccgaccctaggcgaaacactaaaaggcctacctggtgtgaatgctagttattttggcccagtttcatcaagcccaatcattcgcggcttagatggtccgcgtgtgaaaatcactcaaaatggccttgatagcagtgatgcatcacgtataggcccagatcacgcaacatcaaatgacagcctagccgctgaacaaattgaagtgttacgaggccctgctaccctactttacggctcaggtgcgataggtggtgtggtaaatgttgttgataatcgtattcctaccgacaatatcgacactttaacaggcgctgcgcaatacacccatgacacagtatcaaacaccaatacttatgccacaaaacttgaaaccggtaatgaaggtttcaacttccattttgatggcacaaagcgcaaaggtcatgattataaaacaccaacattcgagcttcctgaagagcatgaggaacatgagggtgaagatcatgaagagcacgaaaccgctaaccgcgtagaaaacacctttatcgatagccaaaatgttaattttggtacgagttatgttggcgatcacctaacactaggtgtgtcatatggtcgtatcgaaacagattacggtattcccgctcatgaacaccatcatcacgaagagcatgaagaaggtgagcatcatgatgaacacgaaggtgaagaagaacacgaagagtctgtcttcgcgcaattagagcaagatcgctggcaaggttacatgagctatgcgctacatgataactggattgaaaatatctcactacgtgtgggttacacagactataaacatgccgaaattgaagatggtgcagttggcactgtgttttctaacaaaaccactgaagcacgtgcaaccgttgaacataaattaggcctttggcacggtatggctggctaccactacacagaatcagactacgatgctgatggtgaagaagcctttacaccagcaagtgtaactaaaaccaatgcactattcatgcttgaagagcgtcaatttggtgatgtaaccgttgaattaggcgcacgtattgaggattaccaaattgactcggctgttagtatggcagagcatcatcatgaccacgctcatgaagaggaagaaggtcacgatgacgaagaagcagaaatcatcaattacagcgaagatttcacaaatctaagtttttctgcaggtgcaatctggcaatatcaagaaggccaaagtgttgcgcttagcgtatctcgttcagagcgcgcgcctcttagtgctgaactactttcaaatggtgtacacattgcaactggcacatatgagttaggccttggttatcatatcgaagacggcgaaatacactttgagcctgaagatatcgatcaagaaactgcaaccaactttgatttaagtttccgccgctttattggtgactttggttacaccgttaactttttctacaacgacattgaaaactactattaccagcaaagtactgggctcgtattcgatgaagagcacggtctagagtcagcagcagaggctgacgaagacgcaatggcggtgtatcaatttgcaagtaaagatgcaaaactttacggtattgagtttgacgtccactaccaagtgtcacctagcacattggttaaagtgtttggtgattcaacaactgctaaattaaaagatggcgaaggttacctaccacgtattccagcaaacaaacttggttctgaactacagtatactgttggcggttggcaatttagcctagcaggcactcattattttgagcagtcagatattaccgcttatgaaacaaaaactgacggttataccctgtttgacgcatcggcaaattaccaacttgatttaggccctgtcgatacgcagctgtacattaatgctgataacttaacggatgaactaggtttcgttcacagttcatttattaaagaaaaagcaccactacctggtcgcaactttagcttaggtattcgcggctatttttaatcacttttaatagttataaaaaaaccctttcactttaaaagtgaaagggttttttattaagcttagaaacttaaacaattagttaaaagtttagcccttttgttcaatctttgcccatgaatcacgaagacccacagtttgattaaatactagtgagtcggctttgttatcacgacagaaatagcccatgcgttcaaactggaagccctgctctgcttgtgcattagcaagagacggttcaagtttcgcgttagcaagaaccacgagtgattctggatttagcgttgcattgaagtcttcagcagcagctgggtttggtacgttaaataaacggtcgtataaacgtacttcagcggtgattgactcactggctgatacccaatggattacacctttaactttacggccatcgcttgggtttttacctagcgtttctggatcgtaagaacagaaaatagtggtgatttcaccgttctcgtctttttcaacacgctcagctttaattacataagcaccacgtaaacgtacttctttatcaagtactaaacgtttaaacttattatttgcttcttcacggaagtcttcacgctcaatataaatctcacgtgtgaaaggcacatcacgacggcccatctcttctttattcgggtgattgacaactgataaagtctctactttatctgcatcatagttttcgataacaatcttcaccggatcaagaacagccattgcacgcggtgcatgctcattaagatcttcacggatacacgcttcaagcatacccatttcaaccatgttttcttgcttggtgataccgatgcgagaacagaattcacgtactgatgcaggtgtataaccgcgacgacgcagaccagcaatcgttggcatacgtgggtcgtcccaaccttcaacatgaccattaaccactaagtcgtttaatttacgcttagacataatggtgtattcaaggtttaatcgtgaaaactcgatttgctgtgggtgacactcaaggctgatgttatctaatacccaatcgtataaacgacggttatcttggaactcaagcgtacataatgaatgcgtgataccttctagtgcatctgaaatacagtgcgtgaagtcgtacattgggtaaatacaccacttatcacctgtttggtggtggtgagcaaaacgtacacggtataaaatcggatcacgcaataccatgaatgaacttgccatatcgattttagcacgcagtacacactcgccttctttgaattcgccattacgcattttttcaaatagcgctaggttttcttctactggcgtatcacggtacgggctatttttacctggctcttttaaagtaccacggtattcacgtgcttgatctggcgataagaaacacacatacgcaaggcctttttcgataagctcaacagcatagccgtataacgcatcgaaatagttagatgaatacttaatttcaccatcccactgaaaacctaaccactgcacatcttctttaattgaatttacgtaattgatgtcttctttttctggattcgtatcatcaaaacgtaagttacaaagaccttgataatcttgggcaataccaaaatttaaacagatagactttgcatgaccaatgtgtaaaaaaccgtttggttcaggtggaaaacgcgtgtgtgtagtcgcatgcttaccgcttgcgagatcttcgtcgatacgcgttctaataaagttacttgggcgattctcaatttccgccataggagcataatcctcaaaatattgcatggtgacaaaactaatgcattattacaaaaacaaaccctaacatacagtagttgaaccatgtttattgaagataataagccgattattgaatacattgtttacagacgctgcaaaatcggtaaaaaaattgttctaacgcaataaaatgatcattgactagcgatatagtgccgtcagtttcactaccaataaggaaaaaagatggcttcgctcaatcaacatagagtctatattccaagctctgcgcgtgctaaccagtatgtgctagttgagtttaaacctactgatgagttttttgctcagtttagtaatgtaagctgtgcttataagcgtcttgcaagggagttatttgcactatgtgatgaatatgaactgcacaatgtacatctgatcgctaacgataagttacctgtcgttcgttaccatgatgaggcatatagtttagaaaccgctaagcagattttatttttctataacccacaataccacgaagcacataatgtgtttgccgctgatgaagtaaaatgcaaaaaaattcgtttattatttttggctacaggtgaagatattcgtgctaatgcagcaagttttcaccataacgtacagcgcgtaataaactcattacaagaaaagctattaagcggtcaacctccacttaaaattcgcgatcaccagcatcttacttatgatttatttgctaaagcaaaaggtcacaaagaaagctatggctataaattgcgtagcttatatccacgctatcaatctcgccaatgtcatttaccaacacagcacagtgaaatgacttatgctgggttttctattccagtaacccgcgcgattaaaacgcaatttcaacatatgttgaatgaagagaattacacgcaattttatcaatatatttttgatgcatttaaacgagcttgcgaaaaacgagcgctaacccttggtgcttttatcgctaatggtacccgccctattgttcgtaatagcaatattgataacgcacaaagtaacagtgaactgcaaaagctaacctttgattgcagctcagagcaagtgcaattacaacattattgggatgcaaatcaacttgttgattctttacattttgtaattgccgcagccgataaagacaagcatgacattggttatggtaagtttatgaatcaagtgcaaagcgcaattaatgaagtaactgacgagctggcctttaatccaacgcgccaagatttacgtgtgcgcttttatcagcacattaactatgagtattaattaaatacaatatatagaattagaggtgacgcacatgcgtcaccttttttatagcaacccactcagttgtactatcaacggtttttacttagtttagtaaggtccagtcgcagcactttagaacggcgctcatagttatacagtgcctttttcttcgccggtaactcatcaacggtcaccaattcaaagctttgttctaaaaaccaatgaatactgcgtgtggttaaagcgaataaatgcgagtaaccagcacgtttggctttattaataataaaacgcagtaggtaactccctctatctgcatctcggtattgtggatgaacagccagacttgcaaactcccccacttgttcttcagcaaatgggtataaagcggcacaggcgataattaaaccatcacgctcaatgacagtaaattgctctatttctatctcaagctgctctctagaacgcctaactaaatagccctgctcttcaagcggtctgatcagattaataatcccggtaatatcagatattgttgcactacgtaactgttcagagctttgcggcgcgatttgcgtaccaatgccatctaatgagaaaagctcttgtaataatgcgccatcttctttgtaactaactagatgacaacgatgtacgccgccacgacatgcatcaatggccgcttgtaagaataccgttgcacttaaacatgaatcaggttgattacggtagtttgctaagacagattctgcctcatttggcataagctcggcaattgcttcaccattttcatccaagataccggcctctttacaaaaaccaagcattttgtcggcacgtagttttaatgcaacctgagtggcaatttcttcagcagttaaattaaaactttcacctgtcactgaggcggcaatcggaccaagtagtacgatactgttattgtttaattgatgacgaatcccttcaacatcaatacgtcttacacggcctgagtgatgataatcaatgccttcgtcaacacctaaaggctgagcgataacaaaattaccactgaccacattcaagtatgagccagtcataggagtactacttagcgaggtcgataaacgtgcagtaatatcgaactgcattgcacccgcaactttctttattacatcaaaagtcgcgttatcagtaacacgtatttcattatgaaactgactagttatgccaaattcttgcagtgccgcattgaactgtggccttgcaccaaacactaaaacgattttgatacctaagctcgttaataatgcaacatcattaatgatgctgcgacaacctggctgatcaattgcttctccgccgagcattacaacgaaagttttacctcggtgagcattaacataaggagttgactggcgaaatccatctaccaattctgtggtacgcacgtgatatttaccttttttaataacagcgttttatataaaaacaaataaacaaggtatcagtgtatggaatttttattcacaaataaagcattatcattctcaatttacagctagaattttcgtgcacaaactaggaaactctcagatacaaaaaaggcccgcataagcgagccttttttaagagattaaaactgattaccagcctgttttctctttaagtgcagcaccgatgtcagctagtgaacgtacagtttttacgccagcagcttctaatgcagcaaatttctcatcagcagtacctttaccacctgcgatgattgcacctgcgtgacccatgcgcttacctggaggagccgtaacacctgcaatgtaagaaacaactggtttagtcacgttgtgcttgatgtattctgcagcttcttcttctgcagtaccaccgatttcaccgatcattacgattgcttcagtttgctcgtctttttcgaacatttctaaaacgtcgatgaagttagtgccagggattgggtcaccaccgataccaacacatgttgattggccgaaaccagcgtcagtagtttgtttaaccgcttcgtaagttaaagtaccagaacgtgatacgatacctactttaccaggcttgtggatgtgaccaggcatgataccgatcttcgtttcacccggagtgataacacctgggcagttaggaccgatcatacgaacaccagtttgctcaagcttaactttaacgtcaaccatgtctagtgttgggataccttcagtgatacaaacgataagctcgatgccagcatcgatagcttctaagattgcatctttacagaaaggtgctggtacatagataactgatgcagttgcgccagttgcttcaacagcgtcacgtactgtgttgaatactggaagaccaaggtgcgtttgaccgcctttacctgggcttacaccaccaaccatttgtgtaccgtactcaagcgcttgctcagagtggaaagtaccttggccacctgtgaaaccttgacagataacttttgtatctttattgattaatacagacattatttgccctccgcagcagcaacaactttttcagctgcgtctgttagtgattcagcagcgatgatgttaaggtcagaattagcaagtacttcacgacctagttcagcgttagtaccttctaaacgtactactactggaacgtttacgcctacttctttaactgcgccaatgataccttcagcgatcatgtcacaacgtacgataccaccaaagatgttaactaaaaccgctttaacgttgtcgtcagataagatgatcttgaatgcttcagatacacgctctttagtagcaccaccaccaacatctaggaagttagctggcttaccaccgtgtaggtttacgatgtccatagtacccattgcaaggcctgcaccgttaaccatacaaccaacgttaccgtctagtgcaacgtagttaagctcgaagcttgcagcgtgagcttcacgtgcatcttcttgtgaaggatcgtgcatttcacggattttaggttgacggtaaagcgcgttaccatctacaccgattttaccgtctagacagtgaaggttaccttcgtctgtaattactagcgggttgatttctaatagtgcgaaatcgaaatcgttgaacatgttagcaagacccatgaagatcttaacgaactgtttcatttgagtagggtttaaacctagtttgaagcctaattcacgagcttggtatgcttgtggaccaactaatggatcgatctcagctttgtgaattagttctggagtttcttctgcaacttgctcgatttcaacaccaccttcagtagatgccatgaaaacaactttacgagaagcacgatctactacagcgccaaggtataattcgttagcgatgtcagtgcagctttcaacaaggattttagctactggctgaccattttcgtctgtttggtaagtaactaagtttttacctaaccagttcgcagcgaactcttttacttcgtcgattgttttaactagcttaacaccgccagctttaccacggccacctgcgtgaacctgtgttttaacaacccacatatcaccgccgattttctcagcagctgctgcagcttcttcaggtgtatcgcaagcgaaaccttgagaaactggtaaaccatattcggcaaaaagttgttttgcctgatactcatgcaaattcatgatgctttatccaattttttatactaaaagagctgaatatttatgcaaaataaacagctatcccaaattgcgcacttagtataaatcccaaggctccacatgaaaaccccagttagaccaaaggcgcaaaaaaaaagctgtgaacagggttcacagcttagtttttatacaaccagattaaacatctagtagtaaacgagttggatcttcaagtaactctttaattgttactaggaagcctactgattctttaccatcgatttggcggtgatcgtaagataacgctaaatacatcattggtaagatttcaactttaccgttaacagccattgggcgatcttggattttatgcatacccaagattgaagactgtggcaagttgatgataggtgtagaaagtaatgaaccgaatacaccaccgttagtaattgtgaagttaccaccagtcatatcttcgatagatagtttaccgtcacgacctttaagtgctaattcacggatacctttttcgatttctgccactgatagcttgtcacagtctttaagaactggtgtaacaagaccacgtggagttgaaacagcaatgctgatgtcgaagtagttatgataaacgatatcatcaccatcaatagatgcattcacctcagggaaacgcttaagtgcttcagtaactgctttcacgtagaaagacatgaaacctaaacggataccatgacgcttttcgaacacttcttgatactgcttacgaagatccatgattggcttcatgttaacttcgttgaatgtagttaacattgcagttgagtttttcgcttcaagaagacgattagcgatagttttacgtaaacgtgtcataggaacacgtttttgtgtacggtcacccataggtgctgctggcgctgcttcagcttttggtgctgctgcaggtgcttttaagaatgtatcaacatcttctttagtcacacgaccgtttttgcctgtgcctttgattttagatgcatcaagacctttctcagcgattaaacgacgaactgatggtgttaacacatcagagctatcatttgattcgcttgcagtagcctcttcagcttttgctgcaggtgctttagctggtgctgcgcccgctttaactgtaccaattacttgctcaccaagtactgtttcgccttcagcgtgaatgtgctcacccatgataccgtcttcttgagcaaccacttcaagaacaactttatcagtttcgatatcaactaggttttgatcgcgagttaccgcttcacctggttgaacatgccaagtagcaattgtcgcgtctgcgactgattctggaagtacaggtactttaatgtccacttctttaccttctgatgctggtgctgattgcgcctctggcgcgtcttctgattttgctggtgcagattctttggctgagtcgtcacttgctggtgcagcatctgcatcaccaagtaatgcaattacttgctcgccaagtaccgttgcaccttcttcttgtgaaatttcagtgattacaccatcgtttggtgcaacaacttctaaaacaactttatctgtttcgatatcaaccaagttttggtcgcggcttactttgtcgccaacacttacgtgccatgttgcaacagtagcatcagcaaccgactcaggaagtacaggaactttaatttctgtgctcattgcttatcctttcttttcaatagtaagcgcgtctgcaacgagcgcttgttgttctttattatgcactgacatgtaaccacacgctggtgatgctgatgctttacgacctgcgtaagttaatttagcaccttcaggaattgcatcaacaaaatgatgttgagaacaataccatgcaccttggttttgcggctcttcttgacaccaaacaaaatctttaacgtgttggtaacgttgcatgattgtatccatctcagcgtgtgggaatggatataattgttctacacgaacaatagcaatgttatttaattcttgtttacgacgctcttgtagtaactcgtaataaactttaccactacagaatacaacgcgttctactttatctgctgcaatatcatcgatttcatcgatcatattgtggaacacaccttcagataattcttcaagtgttgaagttgccagcggatgacgaagtagtgacttaggtgtcataacaatcaatggacgacgtaaaggacgtacagattgacgacgaagcattgcataaacttgcgctggtgttgaaggcacacacacttgcatattgtgatcagcacacaattgtaagaaacgctcaagacgtgccgagctatgctctggcccttggccttcataaccatgtggaagtaaacatgtaagaccacataaacggccccacttttgttcacctgaacttaagaattggtcaaatacaacttgtgcaccgttagcgaagtcaccaaattgtgcttcccacattacaagtgaagttggttcagctgttgcgtaaccatattcaaatgcaagtaccgcttcttcagaaagtactgagtcgtatacttcaaatgaaccttgtttttcgctgatgttttgcagcggcaagtaggttgatgcatctttttggttatggataacagcatgacggtggaagaaagtaccacggcctgagtcttgacctgttaaacggatatctgtgcccgcatcaacaagtgaagcataagctagcgtttctgccataccccaatcaagtggtttttcacctgatgccattagcttacggtcgtcgtaaattttcttaacacgcgactgagctttgtggttctctgggtagcttgatactttttcaccaagttcttttagtttttcaacagaaagttttgcatcgtactcaacatcccaatcgtgaccaacgaatttagcccaatctgaagagtgagatgtttctggttgaatttcttcaacaacacagttaccgccatcaagaccgttacggtactcatcagcaagtgctttgacttcatcttctgtaaatgaaccttcagacacaagttggtcagcataaattaggcgtggaactgggtgttttttgattttctggtacataagtggttgagtcgcattcggctcatccgcttcgttatgaccatgacggcgataacatactaaatcaattacaacgtcacgtttgaattggtttctgaaatcaagtgcgatttgagtaacaaatgcaaccgcttctggatcgtcagaattaacgtggaaaataggtgcctgaaccattttcgcaatgtcagtacagtatggtgtagaacgaacatccgcttgttttgacgttgtaaaaccaacttggttgtttaccacgatacggatactaccaccacaactaaatgcattagtttgcgataagttaaatgtttcttgaacaacaccttgacctgcgattgcagagtcaccgtgaatagtaattggtaatgctttaatacctgacttatcacctaaacggtctaaacgagcgcgtaccgaacccataactactgggttaacgatttcaaggtgagatgggttaaacgcaagtgccatatgcacgttgccaccctttgtagcgaagtcagatgaataacccatgtgatatttaacatcacctgagcttaaagtatctttgtgtttaccagcgaactcatcgaataattctgatgggtttttacctaaaacgttcactagtacgttcaagcgaccgcggtgagccatacctataacagcttctttttgtccgctttcacctgcacgatgaattagttctttaagcattggtaccaacgcatcaccaccttcaagtgagaaacgttttgcaccagggaacttagcccctaaatatttttcaaggccatctgcagctgttaatcctttaaggatacgtagcttttcttctttagagaacgttggacgagattgcactgattctaaacgctgttgtaaccaacgtttttcttcagttgaagtgatgtgcatatactctgcaccaactgaaccacaatacgtggtcttaagtgcttggtatagctcacctaaaggcatggtgtcgcgacctacggcaaacgaacccacattgaattcacggtcaaaatcagcttcagataaatcgtggtattcaagttcaagatctcgaactcgttcgcgttcccagatacctaatggatctaggttagcattttggtgaccacggaaacggaaagcattaataagttgtagcactttgacctgtttaggatcgccagagccaccctctgctaccactacttctctatgcttgtttttagcaagctccgcaaattgtgaacgaacctctgaatgttttacgtcaacatccacaccatctacttttggtaattgttcgaacacttctcgccattcttctggcacagaagtcgcatcatctaagtacgcttcataaagctcttctacgtaagcaacgtttccgccgtttaagtgagaagattctagccatgccttcatcacaccttcgtgcatttataagcccttttctttagcgcagaaattaattgttgtaaaaacaaggtggttaatcacttaaccaccttacatattcaagctttaaacagcgcggtttaaaagcattgatttgatttgtccaattgctttagtcggattaagacctttaggacacacgctaacacagttcataatactgtgacaacggaacacgctgaacgcatcgtcaagatctgcaagacgctcttcagtcgctgtatcgcggctatcagccaagaaacgatacgcatgaagaagacccgcaggaccgatgaacttgtctggattccaccagaacgaaggacacgatgtagaacaacatgcacataaaatacactcatataagccatctaacttatcacgttcttcgatagattgaagacgctcacccgccgctggcgtgtcattaattagataaggcttaactttttcgtattgagtgtagaactgactcatgtcaataacaaggtcacgtaccacaggtaaaccaggtaatggacgaattacgattttacctttgccacctttaagtagcgttgataaaggagtaatacatgctaaaccgtttttaccattcatgttgataccgtcagaaccacacacaccttcacggcatgaacgacggaatgataatgttggatcttgctcttttagtttcattagagcatccaaaaccatcatatcttggccttcttgcgtttctagcgtgaagtcctgcatacgtggtgcattatcaacatctggattgtaacgataaacggaaaattgtacttgtgccatcgtctcgctcctagtatgtacgtgctttaggtgggaaagcttcacgcagtttcggcgcgtagtttacttcacgttttgtcatttcatctgtaactgggttaaagatagagtgacataaccagttatcgtcatcacgatctgggaagtcaaaacgagaatgtgcaccacggctttctgtacggaagtttgcagctactgcagttgagtaagctgtttccattaagttgtctaactctagacattcgatacgcgcagtgttgaactctgttgacttgtcgtcaagacgagcatactgcagacgttcacgaatttctttaagctctttaagacctgtagccattgcatcaccttcacggaacaccgagaagttaagctgcatacacatttgtaggtctttcttgatttgaactgggtcttcaccttggccagctttagagctttcccaacggttgaagcgcgcaagtgatgcttcaagatctgattcagacgcatctttacctgcttcaacaccatttaggtatttacctaagaagttaccagctgcacgtccgaacacaactaagtcaagaagtgagttaccacctaggcggttagcaccgtgtacagatacacaggcaatttcacccacagcgaataaaccttcaactactttctcttgaccatttgcatcgatttgtaatgcttgaccatttacgttagttggtacaccacccatcatgtagtgacatgttggaattactggaattggttctttggctgggtcaacgtgtgcgaatgttttcgcaaggtcacatacaccaggaagacgtaaattaagcgtctcttcacctaagtggtcaagtttaagcttgatatgtggaccgtaaggaccatcgcaaccacgaccttcacggatctcagtcatcattgaacgagcaacaacgtcacgagatgctaagtctttagcatttggcgcgtaacgttccatgaagcgttcgccgtctttgtttagaaggtaaccaccttcaccacgacaaccttcagttactagtacaccagcgcctgcgatacctgttgggtggaattgccacatttccatatcttgcaatgcaacaccagcacgggttgccataccaacgccgtcacctgtattgatgtgtgcgttagttgttgatgcgtagatacgacctgcaccacctgttgctaaaacaacggcttttgatttgaagtaaacaacttggcctgattcaatgtcgattgctgtacaaccaacaacatgaccatcgctgtttttaactaaatctagtgcataccactctgaaaatacgtttgttttgtttttaacgttttgctggtaaagacagtgtaacagtgcgtgaccagtacggtcagctgctgctgcagtacgtgctgcttgttcaccaccaaagtttttcgactgaccgccgaaaggacgttgataaacacggccattttcaaaacgagaaaatggtaagcccatgttttctaattcagtaatagcttctgggcctgttttacacatatattcgatagcgtcttggtcaccgataaaatcagaacctttaacagtatcgtacatgtgccattcccagttatcttcatgcgagttacctaacgcaacagtaatgccgccttgtgctgacacagtgtgagaacgtgtagggaaaactttagagataagtgcacaggttttgcctgattcagtaatagcaagtgctgcgcgcatacccgcgccgcctgcaccaattactactgcgtcaaattcacgaacagaataattcacttaaacaccccataaaacgattagaccaattgctacgtaagcaacggccataaggtttaatacaaagcctaaaacagcacgtaatttcgcatttttgacatagtcagttagaacttgccaaagaccgatacgggtgtgaaccataatgcaaacaagggcaattagtgtaaaccctttcattgctagattagagaataggccttgccaggcttcaaaagtgacttctggtgtacataaaaaatagccgataataaaaatcgcataagcgctgattattaatgctgttgtacgaagtgatacaaaatcttgtacaccatcacgtttaagagttgcttgatttaaaaccatatccacactcctgctagaattgcagctacaacacctaaagccatcgcaactttagcgctgaagttacctgattcaagttcttcccagtgacccatatccataatgatgtgacgaacaccaccgattaggtgatatgccaacacagaaatggtaccccacgctatgaatttggcaatgaatccgctgaacagacccttgacgaattcaaaaccttctggagaagaaagagactcagaccaagcccaaatgacaaacgttaaagcaaaaaatagtgccacaccggtgacgcggtgaagaattgatgctttagccgttgccggcatagatatagttgttagatctagatttacaggtctttgctttttcacagttacttgcccatcttgcccacttaggagctcatctacttgtttttctaaacccatcaaaatgaatttcgatggaactatctaagtaaaccgtgttgatacacaaaaagttcacacttatgcaaaacttaaatgtaaaaataaagtttacctacagacaatacggtataaaaccttggatagtatatatagccaaaggtctttttacaattcttgtttagtaagagtcgtttgcgaattagccaatggtataatatttaatcctggcagaatatttattatccatttatgcataatgtttataaaaattgactttacacccctctttcacgttaaaatgaaaagaatgtgcttaaacagattcagaacataacaatcagagttgttatcttaataggagataaatagatggcggataataaagccacggtccatattgatggtcttgatccaatcgaacttccaatttaccaaggcactgctggccaagacgtaatcgacgtacgtacgttaggttctcatggctacttcacttacgacccaggtttcatgtcgaccggttcttgtgaatcttcaatcacttatatcgacggcggtaaaggtgtattactacaccgtggttacccaattgagcaactagctgatgagtctaactacatcgaagtttgctacttactgttaaacggcgaattaccaactaaagaacaatacgatgagtttgcaaaagaaatcacgcatagcactatgcttgatactaaaatcgcaaacttcttccaaggtttccgttttgatgctcaccctatggcgatgctatgtggtgttgtaggtgctttatcttctttctatcacgaagatttagacatcactgatgcaacacaacgtaaaactagtgcaatcaaactaattgctaagttaccaacaatcgctgctatggcttacaaatacaacgtaggtcaaccgtttgtacacccgcgtaacgacttaagcttcgctgaaaacttcttacacatgatgttctcagtacctgctgaagaatataaagttagccctgttcttgctaaagcaatggataaaatcttcatgcttcacgcagaccacgagcaaaacgcttcaacgtcaactgtacgtttagctggttcatcaggtgcaaacccttacgcgtgtatcgcggctggtatcgcatctttatggggtcctgcgcacggtggtgctaacgaagcatgtcttaacatgttagaagaaatcggttcagtagaccgtatcgacgaatacgttgctaaagcaaaagataagtcagatccattccgtcttatgggcttcggtcaccgtgtatacaaaaacttcgatccacgtgcgacagtaatgcgtcaaacatgtcacgaagtactagctgagctaaacattcaagatccacttcttgatatcgcaatgaagcttgagcaaattgcactagaagacccatacttcgttgagaagaaactttaccctaacgtagacttctactcaggtatcatcttaaaagctatcggtattccaacaagcatgttcactgtaatctttgcaatgtcacgtactgttggttggatctctcactgggatgagatgctttctcaacctggtcacaagatcagccgtcctcgtcagttatacactggtgaaacttcacgcgattacgtaccaacagacaagcgttaatacgaatttgcgtttaaaaaaggccgctatgcggccttttttgttgccctgcacttgtctatttgtgcaaagtaattaaaatcgtcgcattctcgtagcttaaggccttccatgttcgatattgcaaaaatacgcgctgactttccattactgaatgaaacggttaatgagcagcctctggtgtatttagactcagcagcgacctcacaaaagccacaagcagttattgatgcccttgcccgtttttatagtcatgagaatgccaatgtgcatcgtggccgtcatacactcagtgaaaacgcgacccgccaatatgaacacaccagaacgctacttgcagattatttttctgttaaagccaatgagttagtgtggaccaaaggagcgactgaatctattaatttaatcgcaaatggtctggcttcacggcttaaaccaggcgataaaattgctatctctgcgattgaacatcacgccaacatagtgccatggcaacaactagcaaagcgtactggtgcagaactgattattttacctattgaagatgacttggtcattgatagcgtaaggtgcagtgagtttataaaactgtatcagcctaagatagttgctgttactcatgcatcaaatacattaggtaatatcactgatttagcgcctatcattacagcatgtaaagccattaatgctatttctgtgattgatggtgcgcaggctgcgatgcatttacgccctaatctacaagaaatttcttgtgacttttacgtattttctgcccacaaaatgctcgggcctacaggtctgggtggtctttatggacgtttcgagctgttaaattcgctcgatgtttatcaaaccggtggcgaaatgatcgaaacagtgagcctcacgcaaagcacttttcgggatgcaccgggtaaatttgaagcaggaacacctaatattgcgggtgtaatcgcctttagtgaggcaataaagtatttaacatcgttagattttcagcaaatgcgtcaacatgagcatacagtttttgactatgcgataaaacaattatcagctattgatggtattaatatctattcaaaccaaatacataacattggtaacattagttttaattatcgcgatgaacatcccttcgatttagccactctgcttgatgggtttggtgtggccgtgcgcagtggccaccattgcacacaacctataatgagccatttgcacattcctggtacagtaagagcaagctttgcgttatataacaataaagatgatgtagatgcgtttattgatgctcttaaaaacagtattgagttattagattaaatttggataagttatgaattcaacgtttgaagccgttagtaaaaacattgaaacagctgcaggttggcagcaaaaataccgccagataatgctattaggtaagcaattaccagttatgccagaagtgcttaaagtagatgatgccctagttaaaggctgcgaaagtaaagtgtggctatatatcgactttgatcatacagaaaatagccttgttttagctggtgattcagatacccgtatcgttaaaggactattggctttaattttagccttatacaatggtctaacaccggaacaagcagcacaaataaatgcctatgatgaatttgaacgactcggtctaattagccatttaagcccttctcgcggcaatggcatcaaagccatggttgataaaattcaaaccatggctgagcaaaaccgctaaatgttataaagaacgctgttttttatctaaatattttctgattgctttggctgcgacaaaaaagccaaagcttcctgttaccattgtggctgagccaaaaccattgttacaatccatattcattgaaccatctgcgccttgttttgcttggcaaacttcgccttcagaggttggatatacaagctgttcagttgaataaacacaatctacgttaaatttacgctttggattgctactaaagttgtactgttttcgcaaaatataccgtacttttgcaagcaaaggatcatgggttgtcttagctacatcaccaaagctaatttggctcggatcagtttgtccgcctgcgccaccggttgtaataacgggtaattttatacgcttacaatgtgcaattaacgctgccttttctttcactgcatcaatacaatcaatcacataatcaaagccttgaatatgctcacgaatgttatctagcgttataaagtcatcaataacattaattttgatgtctgggtttatcagctcacaacgtgttttcatcgcttcaacttttgcttcacctacggtgccagtcaaagcatggatttgacgattaacattagttgcacaaatatcatcaagatctattaaggttagttgtcctacacccgtgcgagctagcgcttcagcggcccaactacctacaccaccaataccaatgacacaaaaatgtgcttgttgtaaccaatcaaattgctgatgaccatataaacgtttaatgccaccaaaacggatgtcttgtgttgtttctttcatttaccaatccaacgtccaaggagctgtccactctttgaattcgtctgagttaaaaacttcattgagatgagcacccaaagtgtaatcgcatcgatactctttaagctgccctttatagcgaaattgtagtgcataagcatgcaaatttgtgcgctcgtctttacttcctgcatacgtgctatcaccaagaattggcgcacccaagcttttcatcgcgactcttagttgatgtgttttacccgaaaaaggttttaataggtaggcacgtagcccagggcgaatactttttgaataaaagcgggtaacagccgggttggtttggctctttagcaatttaaaagcgccccgacgacttttttccatatccccttttatccaaccttgtttcttctttggttttgcatcactgagtgcaagataaaatttatgcacttgatgggcactgaatagtgcagtgaattcggctgctgcttctttgtgacgggctaaaataattaaacccgaggtgactttatcaaggcgatgtacaggatatagtttttcgtttacaagttgctctgcaagtacaacaaaaccagcacattcttcactatgaaagcttacacctgctggtttataaaatacaaaaaagtcatcttcacttgcatgaagatgaactgtatttacatcgtgcattggttatttactcagcactgcaatgacgcgggctaagtcctctggcgtgtctacacctgcttgtggagcacataatgccttagctattttgattttataaccatgataaagcacacgaagctgctctagagattcaaggacttctaacggagattctggcagctcaatatattgagtaataaaacctgctcggtaagcataaataccaatatggcgggcataatcatcaagattgattttatcaatttgattactcatcatcgcatcacgataataaggaatggttgcacgcgaaaaatacactgcattgttgtgcgcatcgctaaccacttttacacaattagggttaaatatatcgtcgatatcatcaatacttgtgctcaatgttgccataggcgcgtcagaatcagcgagcagtttagccacttgcgagacattttcactagctaataaaggctcatcaccttgcacgttaacgacaatggtatcactttcaagttggagttgttcaaccacttcagctaaacgctctgtccctgattgatgatcttcacgcgtcattagaacattacttgtaaactcactaacagcgtcaaatactgcttgatgatcggtggcaacataaacgtgtgatgcgcctgaagcaactgctttgtcataaacatgttggatcattggcttaccacatatatcagcaagtggtttagctggtaaacgtgtcgatgcgtaacgggcaggaattacaactacgaattccacttatcaacctcttcttggcttagttcacgtgcttcattttctaaaagcactgggatatcgtctttgattggataagcaagtttcgctgctgtactaatcagctcttgattttctttatcaagacgtaatttacctttacacactggacaggcgataatttcaagtaattttgtatcaaaggccattgaggatccctttttgttttaataataaatttagtttttcgataaccgttgttgtcggctttgcatcaacaggcaaataataccaatttggcttggcaaagctaaagcatttaactgcatctttttctgtcataaaaacagcgtcatcaccaaacatagtaaagtcacttgcttgataggcatagtgatcgcgaaaatgatgagtcgatagcaagttaatgccttgctgctcaagacttatctcaaagcgtttggggttaccaatagcactgactgcatggcctttatcttgaactgaattggcgagtgttgaatcactcacggttcgaaatgggctcgatgctaaatcatagcggctttgtgcattgccgccattttctatgactaaatcaaccgattttaagcgcgctttggtttcacgaagtggacctgctggcattaataaaccgttaccaaactggcgttcactatcaactatacagcattctatatctcgggccattttgtaatgttgcataccatcatcagaaatgatgacatcaatatcgtgctgttctaattttttaatactggcttgacggtcaggtccaaccataacaacacaacctaaacgacgtctaataagtacaggttcgtcacccgcttgtgttgtggtcgtctcatcagtaactaacaatggatacgagtcagactgaccaccataaccacgactgatcaccgccacttttaaaccttgttgttgtaagaactcagcaagccaaattacaaatggcgttttgccgttgccacccacacttatgttaccaaccactacaacaggtacatgcgctttaaaagccttcagaatattaagcttgtatagcaatacacgaagcgttgagattagccaaaaaagcacactcaaaggtaagagtaaaacactgagtaaacctggttttttataccagcttttttcaataacactcactactgctcaccaaattgcattttacaaagagcggaataggtgccgtcattttcaagcagctcgctatgcgtgcccttttcgataacctgaccatgatcaataacataaatacaatcactgttttctattgttgataaacggtgtgctatcacaattgatgttttttctttcattaagctatcaagtgcatgctggatcagcttttcagactcagtatcgagagctgatgtcgcctcatcgagaattaaaataggtgcatcttttaaaatggcacgtgcaatcgcgatacgttgacgctgaccgccagataacatcacgccgttttcacccaccatggtatttaaaccttctggcaagtctttaacaaattcccaaacatgggcttgtttggcaaccgccattaactcttcattactgagttcacgttcaaggccatagcatatgttatttgcaatagtatcgttaaataacaccacttgctgtgaaaccaatgcaaattgcttacgaagatccgttagcttgtaatcagcgatattgacaccatcgagtaaaatttcactttcaccttctagctcatagtaacgtggcaataaatttgaaatggtcgatttaccagaaccagagcgcccaactaatgcaatgctttcgccggcattaatcgttagcgacaagtttttcaaaactggttcatctttagttgggtatttgaaagtaacgttgtttatttcaatgtgccctgtcactttatcaatactataggtgccagtgtctttttctacatcttcatcaagtaccaaaaagatactttgtgctgcagaaataccacgttgtaagtcactatttacatttgaaagttgcttaagtggacgtaataacatcatcattgatgatattagtaatacgaaatcaccagagctgattgtgtctatcattgatggcattgacacgacccataaaatcactgccattgcgctcgctgctaagatctgaataaccgaaacacttaacgcctttgttgcatccattttaatgcgttgctgacgattatggttattaatcgctgaaaactgagcaatctcttgctgctgaccaccaaatccgtggattactttatgcccagagagcatctgctctgaactacgagtaacttgccccatcgctgattgaatttttttagatatcatccgaaagcgtttcgatacaaaggcaacaatcactgccaccagcggaataataaccaagaaaatcagcgacaacttccaacttgtataaaacatattgaaaagtaaaaaaacaacaaacgccccttctctcaccacaattaacagcgctttagtaattgcctgttgtacttgctctgtatcgaaagtgattttagaaattaaatcaccattagaatttttatcatgaaaagacacaggtaaatgtaatatatgttcgaataattgttggcgaagagttctaacaacttgggagccaacataactcaagcaataagatgacatgtaattaaacatgcctcgaccaagcactaacgcgataacaacgaatggtgcataagttaatacatcagtattacgagcatttaagccttcatcaataaaaggtttcattaaattgataaacagtgcatccatggcagaatagccaaccatgccaacaatggcgaaaaacgcgattaatttataatcacccacataactgattaatcgcttataaatttgggatgtagtttgatccataacactctcttattcatagacttcgactattgtagccttatgggggtaaaaacaaaacgtcaatcttgttcgaaccagtaactttcatgctcgcgagctgattcaactaaaaaggtatcgttatagaatttgattctaatatggccactgtctgctgtacttaactgcgctatatcacggtcttgataacgttttacaacctcagggtgaggaaactgccactgcccttggtatgcacttgagtggataaccagtttaggccgcacctgctcaataaacgcctgacttgacgatgtattactaccgtgatgagggctgacgagtactgtcgcttgcaggtctgggagcctggtaatgagttgttgctctgcttcagcagaaatatcgccggttaataacacactatactcacccgacttcaccctcaaaatgcaagatttatcattgttattatcaccaggcatactaaagctagttaaactaacattgccgatttttaaaagctttggctcacaacgagcattcacgccatgcggatgaaaatactttaacgttgctccaaagccattttcattccaagagtgaagacctccaatgtggtcattatcttgatgacttactatagtggcaatcacctcaagcttaagcgcatttatgtttgctaataaaactgactgaatatagtcatatcgaccaaaataacgtggacctaaatcatagaccaccgccttattttcttcgctgagcatcaccattaagccatgaccaacgtcaaatacatctaactgaaaagtgcttttcggcgacaaaagccaatcaaaagttacaatcaatacaggaataatggcaaatgatcgataaggataacaaagaaacaataacagagtgctgtaaatcaaaactaaggtattgaactcaacaaatgcgaactcaagccaacgccattgttttgggactaacattatcgattgataaaggtaatttaaaacaaaatctaagccatatagaagtagcgataaatctaaaagtaaggataaaaaactgtacaaaactaagaatggtaaaacaatgacactaattattggcacggcaactaaatttaccagcaagccaatcgtacttacgccatcaaagtaaaacagtgacaatggcaacaggcctataaataacgctaattgtattaagccaagctgtataacacgtctgtaaaaacctaagtttttgccaagagagcttcgaataacaagaaaaataatagcaacagcaataaaactaaaatacaaaccggggtttaataacgtaaatggatcaataatcagcactagtgtaagagcataaagaattgttcgccatcgcaatggattcttatttaagatgtaggtaaatagcaaacagcctaacatcaacaatgcgcgcactgcagacacggcaaaaccacttagatatacataagtagctgcaaaacaaaaacctatcagcataaaccaactattaatctgacgggtttgagacacaggtattcgcattatacgggtgatatatttactgaagtaaaagccgattgcatatacaagcccgatgtgtagtcctgagattgccaaaagatggcttatacctaattcacgtagttgttgtttattttgttgcgatattttgcttttatcgccagttagcaaagcatagtaaagccattctaattggctgccagtagttatagtggatatgtaattgcgatatacctcagtactagtaggtttaccagtctgattttctatctgtattttagaaactgtgcgccctttataaaaaagtctttgtctaaacgcatgtcgttcacgatcaaaactattataattttttacgcttctaaacggcttaagctttatttgcgcactcacttcatcaccaaccatcagtttttgcgctgtgctaacactaatcattgctaaaggtggttttaatttagagagactgcacccctgtatgcttttcaggcttgctttaacgtagaaaggagactgggctgagtgtattgaaatcacttgaaaattagcaattactggttttttaggtcttaagtcgcattcgctttgagaataaaagactaagtaatgaaaaaatactaaaaaaataccgcaaataaaccctgacaatattggcaaaaaaggcttaaaataggcagctgctaaaataacagcaaaacttattagataaaacactgcagtgtttgctgtataaagggtaataaaacaacccaatataaaaccactgcataaccaaacagatgtaaatggttgctttaaatggctaagaaaacgatccaacggtttttacctgatcacaacaaggtaagagatcataaatacttaagaatttttggccgtttattacatgatgccaatttatggcatttaaatcgccgttctgctcgaggagcatttgctgtaggtttattttttgctttcatccctgttccttttcaaatggttctagcagccgccctggccattccatttcgtgtaaacttgcctatttctgttgctacggtgtggatcacaaatccactgacaatgcctcctattttttactgctcgtatattgttggaacaattgccttagcgcaacctacacaacacttccattttgagcctagctggcaatggtttttagaaagcttaacaaccattggtccggctttcttagttggttcacttatttgtgcaacagccgcggctatacttggctatttcgtaacagatatgctttggaagcgctctgtaagaaaagcatggttacatcgacatcaaaaataaaaaactgacaattcaaatatgagtatagacaaaaaacccagctgtaagctgggttttttaatgtagttgaaaagttattttttacgctactttgctttaaaaaagcgacgtgctgctgcaaatggtaacaagattaatgcataccaagggaagcttgcagactgacgctcatattgttcaacttcttctgcagggcactcttcaattgaaccactaattggtgttaacttaacaggtactgcaatactttcatattcaacattaccgttaagatccactaccgtgttaccgaatgaatctgttttttctaccgttttggtagcaacaccaaatatttcattattgttgttaatcgacttggcttcagcaacaacgtatttaaatcgtgtttcaccatcttcttcatagcaaggtaataaatcgtttaaatttacgactttatcttcaccgatagtgtacataaagccttcacgacgacgtgtagacgtattgtagatatcggtttcaccctcaccaacaatcacaccattatcatttatgtcattagcgattgagctagaacttgagaaataatctgtcgggaaaacaacactgtcacttttcttgtcgtaatagaaaaatttagtacggtttgtaccttcgattcttttggttgcataaccaaccacaacatcgtcattattgatagctaaaggctgacccgaggtccaatcatcttcttggtcaagaaactcttttacttcaccattctcaaaaataaccggcatagtgatacgaatatctcgatctttatagcgaacatctgaagtaccagctattaccccattttcattaatgacaaaagcgctgcttctaaatgcaaaatcttcgtcatcttttggcgtaagacctaagccaaatatttccgtattgataatatttaggtcgttatccaaggtccatttaacggctcgtttatcgaaaatacccgtactaaagctacgattaagcgtttcaacacaatctgaaactggctcatcttcgttatcgcaacgatcgtcaatatcatcttgaggatcaactggaataccggtagatacggtacctactacttcgtagccactattggttttgactatgtcatatgcggcactaataccaccgtgctcatcaaattcaggaactaaaggtacttcgacaccattagcaccaataacaataccgcgacttataaagtcacgtaagaagtgagtttcttcttcggtttcatctgtttgggtaaaggcggtcttttcgtaaggcgcactgccccagcccaccatcacgccatcgtcagcaacagcagatagaaggtttgatgttgagcgagttaagccatcataatcaagcgatgcttcatcaaataaaacctgctcttgagacccttctgcagtataagtagtggcaattgcactcgatattttttgatactcagaatcattaggacgactatcagtagataaaaaccaaatcataaatgcgtgtgcatcagcattggtatttactgcatcgttattttggatatcatctaacgtaaacgtaatttctttgtcaattgactcaaatcgcgctttttctcggtcgtaggcgtttttaatgttgcttgcatcaaaatcgatataagaaacgtctacaggtagtttataggtaccatttgcaagaccaatgatatgaccgttttcactaacatccgttatataattatgcttagagccttccagaccacctaactcttctaatttataggtcgcgctcatcgctgaggtacttagagtagctaaaatactggcagcgagtaatttatatttcattttaatccttactactgattctttaaatcttcgagttcttcccagcgctcaaaagcggcttcaagctcagactctaactgggctaaatggttcaatgcttctgatgtaattgcagcatcttgcttaaaaaagtcagggtcattgaccacaacttgctgagcatcgagcgctttttcaagttgttccactttactgggtaattcctctaattcaagttttaatttgtaagagagtttattacttttcttttgtggtttatcttggttttgcaccacgggtttttcttgcttagtttgttgctgttgttgtttctcttgctcaactaagtaggcagcataagcctcatagtcactgtagccaccaataatatcggtaatcttaccatcaccttcaaatgcccagactgaattacaggtattatctataaattcgcggtcatggctaacaataagcacggtaccttgatattggttaataatatcttcaagtaattctaatgtttcgatatctaagtcattggttggctcatcgagtaccaaaatattagacggctttaaaaatagctttgcaagtaacaagcggttcttctcaccaccagaaagtgcttttacaggtgtgcgggctcttgctggcggaaataagaagtcttgtaagtaaccaagcacatgacgtgagcgcccgcccatcatcacttcttgcttaccttcagctacgttatcttgtactgtggcttcttcatcaagcttttgacgatactgatcaaaataagcaaactctaagttaacaccttgcttaacactgccgctatcaggtgttaagtcaccaaataaaattttaagcagtgttgttttacctataccattagggcctacaaggccaatacgatcgccacgcataacaagtgtagagaagtctttagcgatcactttgtctttaaatgcatgacttatgtttttcgcttcaaaaacaagcttgcctgaacgctcagcagtttcaatgttgaaatctgttttaccaacctgctctactcgctgcttacgctctttacgcaactcttttaatgcgcgaacgcgtccttcattacgtgttctacgggcttttataccttggcggatccacgcttcttcttcggctaagcgtttatcaaataacgcgttttgcgtttcttctacctttaaatcatgcgctttttgttcaaggtatgttgcataatcacccggatatgaaattagttttccgcggtctaaatcaagaatacgagtagctactgcgcgaatgaacgcacggtcgtgagaaataaaaacgataccgcctttaaattcttttaaaaattgctcgagccaaataacactgctcatatccaagtggttggtaggctcatcaagtagcaataaatcaggctcactaactagggcccttgctaaagcaaccttacgtaaccaaccgcctgataatgattcaagtttagcctctggatctagctctaggcgcgataacacaagttgaatacgcgtatcaaaacgccagccgtcaactgtttctaattgatttgataagcgctctaacttatttagtaacttatcgttatagtctgtttgcatctgattactaacttggtgatattcaatcaataagttagcaatatcaggcataccctgcgctacataatcaaatactgatcctgcagccccctttggtggatcttgctctagacgcgaaattcgtataccacctagttggtttatttcaccatcatccaagataacttggccatcaagtactttaagtaatgttgattttcctgcaccgttacgaccaacaatacatacacgctcacccgactcaataactgcatcagcatcatctagtaacggatgcgtaccataagcgagttgcgctttggctattctgattaaatccatcgtgattactactcttattctttattatcagcaataaattgcgctaatcgctgtgcatcaaaaggccaaaataatttttcgccttgatgagcttcaacaaccggaatactggtttggtaaagcgcgataagctgttcactatccatgatatcttttgcagcaaaggaaacgtttgctgcaactaataattcatctgccatttcacacaaatgacagccatctgtgtgatacaaggtaaaactagccatgtgtaataagccaactattatgaatttgcttattgcgtttaaaatctggcgataaagttttgtcagaaatattctctgcttttaagccaagccccattaaaccaacttcatccatgataaagccacgcttgttgttagagaatataagcgtgccatttggacttaaaatctttttaacccaagtaaggagcttgatatggtcgcgctgaacatcaaatgcgtctttcatacgttttgagtttgagaacgtcggtggatctaagaaaattaaatcatattgaccttgtgcgtattcaagccatttcaagcagtcagcttgctcaaaacgaaaacgagtattgctcaagtcattaagcgcgaaattctcttgcgcccattttaaataggtctttgacatatcaacggtagtaattgctttggcaccacctatcgcagcatgaacagatgcactgcccgtataagcaaacaagtttaagaaacgtttaccttgtgcgttttgttgaatataacgacgagccaaacggtgatctaagaataaacctgtatctaaataatcaaatagatttactttaaatttagcaccaaactcttcgactacttgtgtgcgattttgttttgataccttagtatattgctcttcgcctttttgctttttgcgtactttaactgcgatattctctggcgcaatttctaactgctcagcggtcaggctaatcacatcttgtaagcgcttttgtgccgtagtgtcatcgatttctttaggtgcggcatattcaaaaataaccgctgaatcatcgtacacatcaactgcaacgttatattctggaatatccgcatcgtagacacgataacagcttacttcattttgctttaaccagtttttcaagttttgcttgtttttctttaagcggtttgcaaatgctgttgaaccttcaaaattaagagctggtttatcttctttgcttagctcgacttgtttatcgtcaagttgatataaatttagcaccacatctaacgggccatttttgaacttatagcgttttaatttaacaagctttaataacttaaataggctttcgtcggtgccaagtaaagcaagcttccaatggttaaagtgctttttgaagccaacacctaagcttcggtgtaagttaaccaactctgccatcgagcctaaacgctcaccataaggtaagtttgaaatcaccacaccaggaagcttagcaactgaggtaagctttgttgcatcgctttgtttaaatttaattacattaccaaggtctgcgcgttctgcgttttcttgtgcttttttaattacaccagcatcaatatcatgtccaataagccaaagctttggatcagtaatttgagctgttagttctgcttttaactctttgtatttttggatgcggaaacttggtaggcgctcaaatgcaaaaccttcgcggaataagccaggcgcttcattacgagccatgcttgctgcttcaattaaaatggtaccagcaccacagcatggatcaaataaaggttgttgtacattttcaagccagccacttcgctttacaagtgctgcagctagatgctcttttatcggtgctttaccttggtcttgacgataaccacgttcagataaacgtggacctgaatagtcaatataaagcgcaacaccttggcgattcaatcttgctacaacacgcacattagcgttgtacttatcaacatctgggcgctgttcaaatagatctgaaaaataatcaacaatcgcatcttttacgacaagaccagaaaactgggtattttttaaatcgttgttagtaccactaaaatcaacagcgaaggtttgttttggaccaaaccactcttgccaaggctgtagtcgagcaaattgataaaggctttctttgtctttaacgccttctttttcttctatcagcatcatgatacgagtggcgaagcgactcgataaacaaattttttgtgctaacaagctatctgcttcaaaacgtacagagcccacggtttgtttagagacttctgcaccaagtgctgtaagctcatcaacaagtaaattttctattccgatagaagtaagtgcgataaattgcaaagtaaaaacccttaaatgctaattgcgcaggattatagcatagcttggcgaacaaaaacgccaacatttgcagggatattagctagatttttacttagtccactaggttgcgaatctctcgccgcgattaaattgcctctagagtgagcatattttaattcacaaaggtcaacgcgccctaggccgatttaaaatgtttttgttgaatataaacaggatggatacgattatttagaaccttgatggcttcaaactgctctagagatagattttcgtctaactgaaagtgtgcgctcaggttaatacaaacagatgcttctggtgaatgatcgacaattaaaaactcaccttcttgtgccttagagtataactttacaaccgcttcaacacttggctggctaccctggtattcatgaaaaaaccaactctttgcaagtactggcttcaaatgaaatttaactgctgtagcgttaagagcaatttggcaaagctctcccggactccataatgagaatgtttcaagatattgataaacttgctgataaaatgcagcatcttcaagactgaagtttggctcttgtaaaacagcatcagtgagttggcgtaatttgtaaggtgtgcacagttgcatatcttggtcaaggtcaaccaaaagacgattattttttgcacaagcaagccatttccattgcttcgatgcttgtaacatgtctcctccctaacttagaattctgtgcgattaatcataaattatagctaagcctgaccattaataaaatacttttttagaacattttattaatgatcaaatgcttagataactgatccttataagccgttaaggatcgtttttaccaattctgggcctttataaataaagccagtgtaaacttgtacaaggtcggcacccgctgcaaatttttcttttgcagagtctgcatcatcaataccacccacaccaatgataggtaacttaccatcagttaaacgcttcagctcactaaccacgtgggttgagcgctgacgtactggttggccagataaaccgcccgcttcgtttgcatattgttggccttgtactgccgcacgctcaagtgtggtgtttgtagcaataacaccatcgatcttattgttgatcaatgactcactaacttgcgcaatttgtatttcatcaagatctggggcgatcttaacaagcataggcacttgtttgttatgctttgcagctaaatcaagttgttcattctttaagctttgtagtaagtcatcaagcgcttcaccatattgtaaatcacgaagacccggagtatttggtgaagagatatttactgtgatgtacgatgcatgctcaaatactttgcgcatacaatgaatgtagtcatctttaccctgctcgtttggtgtatctttatttttacctatatttatacctagaataccgtcatatttcgccgcttttacgttattaactaggttatcaacgcctttgttgttaaagcccatacgatttatgatcgcatttgattctggtaaacggaaaatacgcggcttatcgttaccagcttgagggcgaggagtaacagtacccacttcaacgaagccaaaacccatttgtgaaaatgcatcaatacactctgcatttttatctaagcctgccgctaaacctactggatttttaaattctaaacccaaaaagttaactggtttattagggacagattgagaccacgctgcactcaatggagtatgagcaaatcggcgtaaattattaagtgcaaattcatgagcccactccgcatcacgggtaaacataaaacggcgagctagatcataaaacatggtttgttccttaggtaaaaataaacaaggtagccgcttataaacggaccattgcaaattaagggcaaaaaaataccccagcgagctggggtatgtattttaacgacttttcacttatttggaagtgtcacagttgtggcttaacaacattagttcacgaagtgctactgagaacttcgcaaaatcatggctttgcgatgttttgaattcagatagcatctgtttccaacgttgtagaagtagatcttggttatccatccactcatcaatttgtgcatcaatgtctttgctgtctgctgcaaagctattaagtaccacagccgataacgtacgttgttgccaatcaagctcttcacggtaagaagcacgagcaagtgcttgccagtgatttgcaaccggttggttagtaatttggtcaaggaaccaatgtaagcccatacgcgcacccaacttaaagtacgtgttagataccatagcaatgctacgctctgaattattagcaatttcagctaagtccattacagagaataggcttgatagagacacaactcgtgtcgcaagtgcttttggtacattgctatcaattagcttctcagctgctttaactaaacgctcgctttctttttcaaccatgtagctatttaagttttcacttaaatcagcaaatgttggtgcaaagaactcaattgcttgctcaatcgtttgtgctttattgcgatgacgtaagaaccaacgtgttgcacgacgaaccgtgcgacgtaactgatagagcatttctgtttgaacagctgctgggatcttattatcaagtgcaacaattgatgaccacgtttctggcatctggaacacttcttttgcaattgaatagcaaagcgcgatttctgcttcgttagcacctgtttcttcgtgcatacgaaccatgaagttaaggcccatatcgttaacaatattattggcaagttttgttgcgataatttctttacgaagtgggtggttatccattgcatcgttgaacttctcacgaagtggtaccgggaatgaattaaccaataactgacggtaataagggttttcagtgatttcatcaaccactaaagactctttaagtaccattttcgcgtaagaaactagtacagatagttctggacgagttaaatctttacccgctgctgcgcgctctgcaagttcttcatcagttggaatgaactcaattgcacgatttagcttgccatctttttcaagggcatggataaaacgtactttttctttaagtgttgatgtgccttttgactgtgtaatcgataaggtatgcgtttgacgataacaatctttaagaaccagctgcgatacttcatcggtcatagcataaagtagctcatcacgttgtttacgcgttaagtcaccttcagcaactaagccattaagtaagatcttaatgtttacttcgttatctgaacacgcaacaccacctacgttatcgatgaagtcagtgttaacacgaccgcctttagctgcaaattcgatacgacctaattgagtagcacctaagttaccaccctcgcctaagatcttcgcaccaagctcagaaccgttaatacgaagagcatcatttgcgcggtcaccaacatctgcatcagtctctttagagttcttgatgtaagtaccgataccaccattccaaagtaaatcaaactccatcattagagctgctttgattaattcgttaggtgtcatgctcgcttttttagtgccaagcattttcttcatttcagggcttaagctaattgatttagccgcacgagagaatacaccaccaccttgtgaaataaggtctttgttgtaatcttcccaagaagaacgcggtaaattaaataaacgctcacgctcagggtaagatgttgcagcatctgggtttggatcaacaaagatgtgcatgtggttgaacgccacttgtaagcgaatgtgcttagaaagcaacataccgttaccaaatacgtcacccgccatgtcgccgatagctacaacagtgaaatcagttgtttgacagtcaatatccatttcacggaagtgacgcttaacagactcccacgcaccttttgcagtgatacccattttcttatggtcataacctactgagccacctgatgcgaatgcatcacctagccagaagttatattcattcgcgatgccgtttgcgatatcagagaaagtcgcagtacctttatcggcagcaacaactaaatacgggtcatcttcatcatgacgaacaacatcaactggcggaacaatctcaccacgttcgatgttatctgtgatatctaataaaccacggatgaaaattttgtaacactcttggccttctttgaagaatgcttcacggtcagtcggtagctgtttacatacgaaaccacctttcgaacctactggcacgataaccgtgtttttaacttgttgcgctttaacaagacccagtacctcagtacggaagtcttcacgacggtcagaccaacgtaggccaccacgtgcaactttaccaccacgtaaatgcacaccttcaacgcgcggcgagtatacgaagatctcaaacgcaggcagtggtaatggcatttctgggatcatagaaggctgaaccttgaacgatacatatgacttaaattggccatccgcttctttttggaagaagttcgttctaagagttgcattgatcatatcaacgtataaacggatgatacggtcatcatctaggtttgctacgttttctagttcaagatttacttgtgcaactagcttctcaagcgtcttctcactaccagggttcttaactgagaactttttagtgaataagttaacgatttgcgaagcaatatgtgggtaatttgcaaatgtactttcgatgtaagtctgcgagaaagttacaccaatttgacgcatgtatttagcatacgcacgaagaatagacgcttcacgaccggttaaaccacccattaatactaaacggttgaaaccatcgttttctaaacggttattccaaacattagtaagcgcagcacggaaacgagcagatactttatcaaagtcagcaatgcccttattgtcaattagcatggtgaaatccatgatccaattaactttaccgtctgtcgttttaactgagtaaggcgtttcacccactacacgtaagccaaagttttctaacattggcatgacgtcagataagtggattggctcatctttatggaataagcttaaacgaacaacattagtatttgcttcttcttgtggacggtagaacaacatttctagtttgttttcgtcattaagaagctcaagtttctcgatatcaacaaccgcagcacttggtaaaacctgatctttatatgcacttgcaaatgcttgtgcatatttacggtttagttctttaccgcgtgcttcacctgcactttcaagtagcgcagactggagtctatcttcccaagtacgggcagcttcaattaggttgttttcgatgtctttcacgttatattcaatattattgtcagtcacacgcaccgtataatgagtacgggctaatgttgactcagagaagaaagtagtaaattcgactttgtcgtcagaattaaatgcgttagctaagatacgttgcgtttcacgacgtagtgccgtgttatagcgctcacgcggtacatagaccatgcaagagaagaaacggccatatgcgtctttacgcacaaaaatacggcacatatcacgctcttgtacttgtagtacgcccatagcaacttcaagtagttcggcttcacgtgcttgcacaagttcatcacgtgggtacgtttctaggatatttaataccgctttataagcatgtgtgcctttagcaaagtcacacatttccataatgcgattaattttacttttcagtaccggaacatcagcggcgctgttgttgtagaagctcgaagagaataaaccaaggaaacggtcttcaccaattacattaccttcctcgtcaaaacgcttgatacccacatagtcaatataagcaggacggtgaacacgagacactgaattagttttcgttaaaatcagtaaattattgctacgcgcttcttgacgtgcaacttctggtaattcagaaagtaaacggctgtgctcttcgtctgtgtttttcatcagaccaaggctagtaccttttttaccttttaattgataatcaccctgtacaggcgacagttcatactcacggtaacccattagggtaaagttatcttttgctaaccagtctaaaaactcaaccgtttcagcaacttcactttcgttattattatgatgacgcttaggtaaatccttcgttacagcaattagcttttcacgaattggctgccaatcttctacagcgatagatacgtcaactaacacagactcaagttcttttttgaaagactcaataacttttgcatctgtttggcgatcaatctcgataaagaacaccgtttttgttgacgttgattcttgctctgcttttaagcttgaaatacccgtgattttagcatttttgtcacgttggattttcagtggagagtgaagtaataagtgagaagagatgttttcgcgagtcatggccatacgcacagaatcaactaagaaaggcatgtctttcgcgatgatttcaacaatagtgtgcgatgactgccagccatcttttgctacttctggattgaagacacggacaaccgcgtcatcagagttatttttttctagcgagttccataggcttagtgcagcgccatataagtcactatcgttgcgatgtgccaaatcctctttagacatattgctgtacaaggctttggcgaatttctcaacgagtaacacattatcagcgtgaacttttttctggatcagcttacagacattatctaagataaccgaggcttgcccttcatttcgtgtcattgtatgttccttaatctatactacttatcgattagtagaatatttgtacagccatttattagcgtggagtcaggtaaattctaactcttttgcagctaataaacagccttttcgatgaaatcattttaagcttttcagctatttggtcatctattcacaaaatatagatataaatggccattactggccatattggagcacaattattcacattattttttctggtcagtccagaggaagctaccaattgcaggtaaaagtagtactgcgcccagcatgttaaccaaaaacatgaaggtcaaaagaatacccatatctacttggaacttcagatcagagaaaatccatgtgctaacaccaatggctaaggtaatacccgtgaacagcactgcactgccacgctctgctaatgcattgcgataagccacttcgagtgccacaccttgttttagctgccccatcattgatgacagtatataaatcccataatcaacaccaataccaacacctaaagcgataactggtagtgtcgataccgttaaacctatttcaagttgtaccatcaaggcttgcgctaaagttgatacgatatacagaggtaatacaaccgcaaccgttgccttaacacttctaaagctaattaagcatagcaggattacggcgccgtaaacgtaaagcatcataggtagctgtgcagctgatacagattcgttggttgcagccattacacccacaggccccgatgctaacttaaacttcaactcatccgtttcttcagccttagcaaactctttaactttcgctactacatggtcaatagtttctgctttgtggtcatttaagaaaataatcactggcattacagagcagttaccatcaagtaaacctgagcttgtttcaacgcgcgaagtagcttgcactaaactagccgtattgcgcggcaggctttgccatttaaggttgccctcgttaaagccagcgtttacagattgtgcaactgagcttaaactcactgctgattgcacccctgcgacattttccatctgccactggaaacgactaatacgctccataacatcatgctcagtacaagcagcaggatacgcttctacaatcacttttaggatatctgatgaaatggtgtatttatcagaaatcaaaaaggtgtcttggttatagcgagcatcttgatgcaaagacggcgcacctgcgtgtaaatcaccaatgcgcattttgtcagcttgccaataacccacagcaaataatatcgctgtaagcacaataattaaaccggcggttctacggtccgtcgcttttactaacagttcacgcaatttatctaagaaattcggtttgtctgagtgtgttcctgcttgaatatgcactgagccttcaaagcgcatatacgatgcccacactggtaacaatacgaggtttgtgaaaataattaccgccacacctaaacttgctgtgatggcaagttcacgaataataccaatatcaatggtgagtaaggttaagaagccaattgtgtctgatagcagcgcgattccaccagggatcaaaagtgctctaaagcttgcctgacaacacacccgggttgagcttcctgacgtcacttttttaccgatgtcattgatcatttgcacaccatgacttacgccaatcgcaaacactaaaaacggcaccaaaattgacatagggtctaagccaaagcccaaggttgataacaaacctaactgccaaacaacggcaatgattgaacaggcaatcggtaaaattgtcagttttaaagagtggcagaacagccaaaccatcacaaaggtaaaagcaatcgcgattgcaaaaaataacagtacgcctttagcaccctctgctacatcccctgccatctttgcaaaaccaataatatggatactgactttatcagtacttaacggttcacgaacttgtgtttctagtttttcagcaaaggctaatgtatcgagtttttcttgtgtttgcggatcagtctcgagtaactgagctgttaccatcgcacacgagtagtcactagcgatcatacggccgaccacttttgctttttcgatgttttcttttacaactgcaagaccacgtttatcggctgtgaagttagccggaataattggaccaccagcgaagccatcttcaacaacttcaacaaaacgtgcacttggtgcaaagattgaattaactaatggacggttaacacctggaataaaataaagttggtcatgaactgcttttagttgggtaaaaaattcttcattgaaaatatcaccgtctgcatcacacaccgaaattaaaatgctatttgcaccaccaaattgcttttcgtgtttggtgtatactttcatgtattcatgattaagagggatatttttattaaacgaggcgtctaattgaatttgtgttgctttgaataataaaaaacaggtgatcaaagcaaaggaaataattgcgaacaagcgatgacgaaataccgctctttctaaaaagtctaataaaccacgcattacggattcaactccttcactttaatgccattttctgaagccataattagtttgtcttgaaacacaacaccgtcgagcaatgatttgccatcggccatttgctcttctgataattgatcacccttaacatgaaaaataactccactattggcaaataaaagccattcgttattgtggtttattgcgctgttgacggtggcataattagtgttttgaattggtaaccactgttcactatttgcttgacgagtaaatatattgccacgcagacctgcaactaggtcttcaccaccctgatctgcagttgacgcaaacgtaaagaaagagcccatataaatctcttcaagacgttgccatgtttggccattatctacactttcggccattagccccatttcacctgctaagattaatcggtctttagttttcactatacgattaaaatgcggcaaaattgatgcggtctcaagctcatatccttcaggatctgtttcttttaaatcattcaaatagtcgcgatcatcttcaaataacaagctatctaaaaaacgtttctgccatgtttggccaccatcagtggtttcaaaaaacatgccgtatgcacccactgcataaccatggctttcagatgtaaaaagaatatctaaacatggtttatccatgtttggtaaagattgttgtaactgccaagttttagcagcatccacggtgttgataatagtggcatcgtggccacaagcccagcctaattcgtcattataaaaatcaaccgcggtgagtaatacttgtgttggtacactggcttgctgccatgtttgtgcgtcagtactagtgataaccacaccatgtttaccaacagcaaccagtttttcaccgaccaattcgatgtcagtgagtagagttttgtttgcattaacggcactaatcgcttgttgcggtgtgggcatgtcttgagaaaaacatgaagcactataagcaagacaggcataaagcaaatacttcataaagataaatcgccttcgaaaagataaaaagagaagtcaaaaaagccactgggaaaaccaattgcgtgtcttgatgacttacgcgaattgcaaaaggcacctgaagtcaggtgccttagattgtttaacgaccttcgcggcgtaaagcgcttgaagtgaactcgttatcattgaatgattgtgagaaatcatacattttttcttggttatctaaaccaattgctaggtaacgacgtgagttaaggtcatgataaacttctaacgtactccaatgagtcggtacttcatagtagttaagaccatgtgccattgctacacgatacatttggtcacggttatcataaatatccgttacatgtacttgccagctatcttcatcaatatagaaaacacgtttcttataaatatgacgcgtaccttctttcaggtttgcttctacaacccaaacacggtgcttttcgtaacgaacatattcagggttaatgtgaccagcttgcaagatatcatcatagcttagcttatcgctgtgaagtttatagctgttatatggaatataaagctcttgcttaccttttaatgtccagttgtaacggttaggagaaccgttgaacatatcaaagtcatcagtggtacgtaagctatcagccgctgttcctggtgcatcatatgcaacattaggcgcacgacgaactcgacgctgacctgagttgtatgtccatgcttggcgtggcgttaagatttggtccatagtttcatgaactaataacgcagtacctgctagacgagctggctcagttactttttgcttaaacttaaacaagatattagattcttgcagtttttctggcgttgcatctggtgatgaatattcaactaaaagttgctcttcaaaaccaacataattatatgagcctgacgctgttggtgctgcttgaccaccagagcgttcaattgataaaccacggaaacgtaaaaggtgattccaaattgcttctaaaccatctttaggaattgggaacggtacacccacagctgtgtttttaataccgttaccaccttcaactaactcggctgtcgtagcgtattttttagtcgcatcataaacaaactgcggataagacgcactacgacgcgttgggtaaatgttcatcttaaacgtgtctggataagtgttgaataattcaacctgaccagggctcaagtactctttatatttatcaacgtttgacttatcgatggtgaacaacactttatcatcagcgtatgggtctgggtggtgcatgcctggtttatagtctgcaggaggggttgtgataccacccgtccaagctggaatagaaccatctttgttagctgctttttctgcgccaattggcgttaagtcattacctaaacgtgctgcttcatcagcagtaatttttgcaagtacactagagcttgcgaaaacgctacaaaaagctgcagcaatgagggtaggttttctaataatcataatttacccttagattgaatatttaatattaaatgaaacataatcgcggtcagagaatgtattcgtcgcgccaccaccccagaaagagttatagctaaagtcgaatgaccacgcattttgatagttgaagttcatcgttacaccgagtgatttacggtcttcaacaaataagaacatcggatcaggtgtaataccattcacatcatgtgagaacacaaaacgtggcgagaagttaacaccgttgaaaatgttatagtaatcacctttagcgattaaacgataaccccatgccgatgctgttgggaacggatttgtttcaggaccattcgataaacccatatgaagggttgaataatcatcgcttaatggcccctgcataatgccgcttcgccccgtaccagcaacgtttaaacgcagctcatcgtattcaggcatattattaatgcgcacaccaccgatttcaccaacaaccgcccagctgtctgcacctaatgatgggccaaatagatgcgttgctgtaaattgtaattgtgctgtgttacgtaatataaagccttgcgccacttcaccaggacctacaacacttgtagcatcccccagactcatttgcgaaatacccgcaaagtcaggtcgaattccagccacggctaattgttctggcatacccgcataaagaagctctacgtcatcaatttgtagtggctcatcttgacggaatgcaaattcaccagcgaaagcagtctcgcctaatgatgtattaaagctgataccataaagcttaatatcttcagggtattctaattggcctttggtgaatgcttgtaagctagttacattatcttcagtgatttctgtagataacaacataccaatatcagccgcgatagcaccagctgtaaaattagacacttgaccagaaattactgggcgtcggctatggtaattgatgtggtataaagcaacttcagtatcgtttaattcaggtaaaaacatacctaaacgtaaaccatattgaccaccatcatctggctcatttttacccgcactgcccttacctttaagagctactttagtcggataagctaaatacatttgcgccatcatagcttgaccttgcgcagatgttggatcaacaccttgcgaacgcacaatatcgtctaagctgtttaagctttctgttaagaatgctaaatcgatatctgggtttgatgtaaaacctagttgaatattttgctgataaccattctctgacgcgaaatcgttagtcgagaagtacgtgcctgcagctggaagacgtgtttcatgccattcatattggtaaaagccttccagtgttaagttatctgtaatgccaagtgatgcccaaagcatacccacagggataaaggcttcttttaactcagcgcctggcgcttttaaacgatcgatatcaactgggttaacgtttataccatgagaaatcaaggtactttcaccccagtttacaacttgctgacctaagcgaatagacagagggttacgaccttcatttaaatcgaagtttgcccaaacgtacgcatctaataaacgtaaatcagcacatacttgttctttagtgtcatcatcgtcacatgggtctactttgttacctgatgtaggattgctatatgcaaaatcgccatccatcaatgcaaagtcgtaaaaatacataaagcgtgtaaagaaaccatagttatctttactaattgataactcgtggttgccctttaataattttgagaatgaatcgccactatcaaaatttaaattccctgcatcaccattattagagtaggcaccaggttggttccaaacatccgcagaagaataaataggatttaacgcagaatgataacccgtccaatcaaatgaaggattattacttttacctatatgtttaaaatctcggtcttcaacacgaatgctttgaccataagaaaagttagagtcaaaacgtacgtcaaagtcccctaactcgaagtttgctgcatgcaaagatgtacttgagattccgagtgtagccgccgcgagtcccaaagctattttgtttttaacaaaaagcgatcgttttatcattgtgttcatccccctgtaacgggttgttctgtgatcaaattgttgtttttagtatctttctaacgatagaagcgaaacaataaaaatacaatatagaacgcattcaatcggttaatatttatttaaaaatgtgacgtttacgtattggtaagacgtcataccagatattttatacacgtaaattaacaatagaacaaatcgaattaacaaaaatataataaaattactgttttgaagagcaagaaaataactacaaatgaggcttttttactgggtactgagcaataaaaaagcagctatagctgctttttaactcactttctctaattttataaactgattttcatcggttaatgttagccgaaagcgccctcttattcctaaagaagaaatgtgcgggcgtaaataacgagcatcgaatcgtacgattttaccgccgtcttctgttacctgaacagacttatatttaccatgatagtaatcaagacattcagcataactaaggtacaaagcaaaatagtattctctcattagctttcaagtgctttctcaaccttttcaaataaatcatcgcttaacccttctaaatttgctaaacgcattaactgcgcttttatagctgctgaacgattttcgtcgtaacgtcgccatgacataaatggggttagcattcgcgatgcattttgagggttaatatcatttaatttaactaataagtcacccaaaagttcataacctttaccatctgcacgatggaattgggtaatattaaaatgactaaagctgccaactaatgcccgtacacgatttgggtttccaaaatcgaagcttggatgattataaagagctttaatatcttcaatactgctcgctgtctctttcatcgcttgcagtgcaaaccatttatccatcacaagtacatcatgacgccattttgcatcaaattcatcaagtaatgtgtcacacaatgggtggttagctttcacaacagcacttaatgctgccaatacattcgtcatattactactgtgagcagactcattaattaagctatttactgagttgtgatttgttttagctaaatagtacaagcaaacttgtttaagagcacgtatggctacagcagttgcagaggttgacccatcatccaacagagcgttataacaattaacaaaagagtcagctaaactgcttgcaatttgcgcttcaaaggtattttgcactgcgatgatgtcatccacaggaatgattgagtattccgcggctaaagtatcgtaactgggtagttttaacagttctgcaattagtgcaagatcaccatctcgctcatcaataagtgttttaagcgcattaattatttcatctgataagttagcatcaccagatgcaacagcttgtttcatctcattagtaaataagcgttgttgagcatcccagcgcgaaaagtcactacgggcaaaacgcataatatgtaaaagatcagcagcagaagtgttttgattaacaatgcatggcgcagagaagtcctctaacagcactgcgactggacgctgtttaataccttcaaaaacaaactgctgcgttttttcagtgacatttaataccgaatcttgtggctggttattaatcacaagaggtagtgactgccctacactgtctaaaagctcaatagcaaacggaatgtgcaataaggcattgtcaggttgattatcaggagcaaactgttcaatgctcagtgtgaaggtatgcttttgttcatcgtaaacttgttctacattaagttttggcgtaccagcttgactataccaacgcttaaattgcgttaaatcgatacctgatgcatcactcatagcagcaacaaaatcatcacaggtaacagcttgtccgtcatgacgctcaaaatacaatgacataccttgttggaacttttcttctcccagtaaggtatgcatcatacgaataacttcagcccctttgtcatacacagtaaccgtgtaaaaattgttcatttcgatgactttttcagggcgaattgggtgtgccataggccccgcatcttcactaaattggtgcgttcgcattactttaactgcatcaattcgattgagtgctcgcgaccccatatcactactaaactcttgatcgcggaaaacagtcaatccctcttttaaagacaattggaaccaatcacgacatgtaactcggtttcctgtccagttgtggaagtactcatgtccgactatggattcaattgtatggtaatctttatctgttgctgtttcttgattcgccagaacacatttagagttaaagatatttaaacctttattttccatcgcgcccatattgaagaaatcaacagcgacaatcatgtaaatatctaaatcgtattcaaggttaaagcgctcttcatcccatcgcattgattttttgagagatgtcatagcatgaggtgtttttgataaatttcctttatcaacaaataaagctaattcaacattgcgacctgacttggttgtataatgatcacgtagcacatcaaagtcaccagcgactaatgcaaataagtagctaggctttttaaatgggtcttgccattttacaaagtgccgaccgtcatctaagttaccagcctcaatttggttaccatttgagagcaggtgagtatattttttgtcagcaataatagttacatcaaaactggcaagtacgtctgggcggtcgaggtaataggtaatttttcgaaaaccttcggcttcacattgcgtacagtaagcaccacccgacaaatacaaaccttctagtgaagtattcgtttgcggatcaatatggttttctattttcagaataaagttttctggtaggttatgaatgattagtttttcatcttcgagtgtataatcatcataggctttatcatcaaccactactgagataagcgttaaatcaacaccatcaagagcaaggtccgaattactttcatcagtacgattgattgtcattgtagactgtactgacgtttgtaaaggcgctaattcgaagcgtaaatcgatatgttgaattgaaaattgaggggcttgataatcttttaaatattgagcttgaggtttactcgtagcagacataactggctccaaaatggccctgcaactatacagggcctaagtttattattcagcgctagcttcttgtttaacgtgttttggggtaatacgtaaaatcttaatacctaaataggcgtaaacaaccgctaagaatggattaattaaattaaagaatgcatacatagcgtaatcaaatggatttattaataaaacactctgcatgtaagcaccacaggtattccaaggtataagtgggcttgtaatagtaccgccatcctctaatgtgcgagataagttaactggcttcaaaccgcgcttttcgtactcgtctttaaacattcgaccaggaacaacaatcgcaatatattggtcagctgctaccgcattggtaccaatacaggttgcgatagtggcagtaataagcgagcctgtgctttttgctatttttaaaatgctctttacgaacatatcaagtaaaccggttttttccataatagcgccgaacatcaaggctgtcataatcagccaagttgttgttagcatgcctgccataccgccaccacttaatagtgagtccattttttcatcgccagtatcgatactgaaaccgtcgaagaaggttgtccaaactagtttaaaatagccaatcgcgtggccttgtgatgcatcaatttggctatttattaaatctgattgaaataacatcgcccaaatcgcacctaatactgccccgatagaaatcgcaggaaaagctggcatcttacggattgctaagaaaagtaaaacagctaatggcactagcatctcaaagccaatattgaagttttgctctaataagttaacgatttcatcaatacggccagcttctgtcgaaccacctgcattaaagcccataaaaataaaaataattaacgcaataataaagcttggcactgttgtccagagcatatgatgaatatgctcaaataaatcagctcccgcaacagccggtgccaaattagtggtttctgataatggacttaacttatcaccaaagtaagcaccagaaataacagcacccgcagtaacaacttgttcaaggccaaggcctgttgcgacaccaagcagtgcaacaccaatggtcgcagctgtagtccatgagctaccgatactcatcgcaacaatgccacaaattaagcaacttgctgcgtaaaaccagcttggattaatgatctgtaaaccatagtaaattaaagttggtacagtgcctgaaagtagccaagtaccaattaaagcaccgaccatcaaaagaatgatgattgcaccaagagacaaagtgatcccttctatcatggcttgttctagtttcttccaggtataaccattttttaagccaattaatgcggcagtaaaggtggcaaataataatgcgatttgatttggacccgatgatgagttatcaccgaataagtaaactgctgcacctagcaggcaaaccagcactgaaattgggatcagggcgtccaaaaagctggcctgtttaacaggtttatcttcaactgaattcaaaagatagtctcctacacgtcttatatggcgtgtttaattattattgttcataagcctcaaacccttatagtttaaggctatcagatttttcattataacaagatgacctgttttaggtagcaaaaaaggcgcctaagcgcctttttattgaacaattttgctaaaaaattgctaattattttttcgcgatacgaccatatttaatatagtcctgagtgatcagagccgcttcttctaagaatgggtctaaatcatcaagcacatcaggtaagtcgtctagtttctcaactggcttttcacccagacgaaccaaacgttcattcgcacgctctaatgcacgctcttcaccttcgtctttctcttttaagcggtcagcttcaactagtgagatagtcttacggtctttctcttcttgatagcgcttaatgtcatcaaacacatagccaaactcaggttcacttgcaatacgtgcatcatgaagcttattaacgtaagagatagctggttttaggttatcaactgagttgtatttagcacggatgatgctgtcccaaggtagtgcattatcttgctggctttcgccccactctgcaggatcgatagctgaagggaaagatacgtctggtatcacgcctttgtgctgtgtactaccgccattgatacggtagaattttgcaatcgtatattgcacgctacctaatggatgatcatataaatcgtaagcacggccaagcggtttatgctgctgtacagtgcctttaccaaatgtttgctcaccaatcacaattgcacgaccataatcttgcattgccgcagcaaaaatttctgaggcagaggcactataacggtcaactaataccgttaatgggccatcataaaaagtcacaccatcacggtctttttgctcttcaatacgattatttagtgtatgaatttgaacgaccgggccttgatctataaataaaccagaaagttgtgtcgcttcatataaagaaccaccaccattttgacgtaagtcgatgataataccatcaactttagcttcttttaatttagcaagctcaacttttacatcttgtgataggttattgtaaaagcctggtatttcaatcacaccgattttactggttaaatctgaatactttgcttcaaacacatttgatttggcagcacggtcttctaagcgaattttatcacgggttatttcaaccactttaggagtgccgtgagcatctgcaccttttaaatattgtaaacgtactttggtgccttttggaccttttataagctcaacaacatcatctaagcgccaaccgataacatcaacaaagtcttcaccttcttgggcaacaccaataatacggtcatcagctttaatttgctctgacttatctgctggaccacccggtactaggctacgaattactgtgtaatcttcatcataactaaggactgcgccgataccttctaactcaaggtccatatccatcttgaattgttcagcacgtcgtggagataaataagaagtatgcgcttcgatgcttcgtgcaaacgagttcattacaatttgaaacgcatcttcactatttgtttgtactaagcgtttttgcgcattgtggtaacgcttggttaaaacatctttaatgccttgccaatctttacctgtcatttttaagcgtaacgcatcatatttaactcgttgacgccataactcatctaactcagcctgagttgttgcccaactcgcgtcctcgcggtcgaacatgtattcatcttttttatcaaaagtcatttctttatcaagtaatgacaatgaataatcataacgctcaaaacgtcgttttaagcttaagttaaaaatatcaaaagcaaacccaagcttccctgtcgaaagtgcattatcaaactggtctttatattgcgagaatgatgcaatatctgaagctaaaaaaacacttttgttgaaatcaagagattcgatgtaacgatcaaaaacttgctcagataattcgtcgttaaaacgaataggtttgtagtgtgcacgagtaaataagtttgtcacccgtttactagccgtactatgctggctttcttgcttaagaataggcaaatcttcaacagtaagattgtctgtagatgccaataatgaacctgaaaacagggcagcgactaacggaatgagcgtaaacttattactcatacacaactccttaattttttacagctattaaatgatatacaggctgtctgctttggtcttaacttgcatccctgttactaactcaacatgaacctcatctttgttcacttcagtaataaccgcattaacaagtgcttggccaagtttaactttaactttgctatttaccttgacctcagaggcaggtaaaggttcaacttttccagaacgttttgcaggtgcagcttttgcaggcttattgctaactttagcgcctttttcagctgattttgcatgatgacccgtattctttttgtaagattttgtgtcaccttctttacgaggacgctgctgctttttgcgtttagccatttttgcacggctttcttctaacgctttttgtgcatgttcaacgtgttcttgttccaccttttcgtcttgattaccatcaagatcgatacgaaactcagatttagttactgcttctaaataacgccaattagaggtgtattttcttagcgcttgacgaacctgagttttacttactttctcagaaccttcaatgcgctcagcgatatctttaaaaatacctacttttagcggttgaatgccgtctttttgtttaaaacattgcggaaattcttggtataagaaatccagtacttcattaatatcttttagcttgtttgtggtttccatgttagaaccttttattacatcttttcatcaagtgatgaatcgacatagtgtgttacccagtcggtcaactcttcgaagtccgcttcaataagcgctaaatcaccgcgaaggtgttcccaaataccattaataatttcatcaattgattcacagtcaaggtcatcaggtagacgatcccaagccatgtgaatcaagtcgttgagcctttcagcaacaacttcttcttccccttcccaatcacctacatcgtgaatcgcaaaaaggtaatcttgcacatttagcagatctttcattttagatttgcctcaaagcattttaccaatgcttctaaaccagcttgatcatcagtatcaaaacggccaatgctcgggctatcaacatcaagtacagcaaacactttaccatctttaaaaacaggtacaacaatttcagaatttgatgctgcatcacatgcaatatgacctgcaaatgcgtgaacatcttcaactaattgtgtttgttgtgtttgtgcagcagtcccacatacccctttacctaccggaatacggatgcatgctggattgccttgaaacggccctaacactaattcttcgggagaatccattaaataaaagcccgcccagtttatatcctctaaagaggtaaacaacaacgcacttaaatttgccatatttgcaatgacatttgattcacctgcaattagtgattcagcttgtttaactaatgactggtaaaaatcctgcttttgcataccaaactacttcttattaaacatacagtagctaaaggtactctttgtaagcaataaatgaaaccttttaagggcaaaaaaaaacaatttgcccttaaaataagctagcttgattaaatattctgctattgatgtggagattgggttgctaacccctgtcttaaaccaaataaaaacaaccctgctgctaaggcagacataactgcattgattacaaatgccatccctgtcgttgcacttaacaagtaactaaaaattgccccacctaataatcccagtgtcaaaacgcccgaatagtttacttttgcatatttatacataagtaaataacccggcactacaaacgctgccattgtaagacccacaatgtgcgcattagcgattgcactgacaagtagattaaaaaaaatattcagcccattaccatctaaggtaaaagcataataaaggccgaggatacaacctacgataacgggcgataataatgaaagtcctacactctttgctaaacgatgtttcataaattccctaatttcacaaagataatacgagatacgtaaagcatggactaagtggttgaaatgcgaaatatcgacaatagtcgtaatttgtaaaacagaggaaaggctgtagaaacaaaaaagccgctgaataaattcagcggcttcaatgatggtggagagatagggatttgaaccctagaggggctacaaacccctgccggttttcaagaccggtgcattcgaccactctgccatctctccgaatgcgaaaaacctactcgctaacgccagtagtaaaaataatggtggagagatagggatttgaaccctagaggggctacaaacccctgccggttttcaagaccggtgcattcgaccactctgccatctctccgacggcgtgcataatagataaggcagctgtgtttgtgaagcttttttttcaaaaatctgtttaagtgattaaaaaacaactaaatcgctcagcattaacacaattaaagtcaaaatataatcgatttgaactttttgattattttgcatgtctattgatctacaaaggtttgcccaaacatataactcttgataggcttagtttcagtttaatattggaactaacgaacgaattaagttcattcaaaggagctctaacaatggcgtttaatcaatcgtacaataccactagaccggtaatgtcgactattgaaacaaataaagtattaaaaaatacttactttttactggctatgacacttgcttttagcgcagtaactgcaggtatttcaatggcgatgaatctaccttattttatggggttagtatttagcttgattgcatttggtgttctttttgtagttaacaaaaaggctgacagtgcatcaggtgttgcatgggtgtttgtatttactggtttgatgggcgcgggccttggccctatgcttaactactatgcagcaatgccgaatggtccaatgctaataatgcaagcgcttggttctactgcgttgatcttctttggtttgtctgcgtatgcacttaccactaaaaaagacttctcatttatgggcggctttttaactgttggtttaatcgtggttatcattgcaagcctagtaaacctctttattggtagctctatcacctttatggttattaatgcagctgttgtattgattatgtctggtttaatcttattcgatacaagccgtatcataaatggtggcgagactaactatattcgtgccacagtatctttatacctgaacgtctataacttatttacatctctcctacacctacttggtgcaagtgatgactaattaaatagttctgttaaaatagcccctttctaggggcttttttattggatgcgttttggcaaaatttgtactttctcttcacaccgcaccgactgaccacgatactacacaacgtctgattaaattttcacaggcatgcattgagtcaggtcacactatttcagctgtatttttataccaagcaggtgtttttcatgccagccaacatttagagcttgccagtgacgaactaccaataagtcgtttgtggcaaggtttacatgaacaagctattccgcttttattatgcgttacagctgcagaaaaacgaggattaaatattaaccaaacgggtgttttcacagtggcggggttagctgagtttgcaatgcttgcaagtgatgctgataaatgggtgcaattcaaatgaaaaacgttttagttattagccaacacagcccgtttgatgaccagcatattcgtgactcactcgacacgacgctaattttcgctgctattgaacaaaacattagctggttgctcagtggtgaggcagttttagctctaaaaaagaatcaacagccagaacaacttggtatcaaaaactattttaaaaccattaagacgcttgagttatatgatgtagaaaatatttatgtgtgcgaaaaatcattaatagactttaatttaacaaaagataaattaattattgatgtgaaggtagccagttttgagcagcaacgtcatttaataagccaacaagatcaggtggtaacattatgagcacacttcatatatttgctaaaccactttctcattattgcaccaatacgctagcaaatttaatagccgcagaggatactattctattagttagcgacgcttgctacagcagcacgcaatttaagcaattttcatccgctttatatttactcaatgaagatgccacagcacgaaatatctctataagcttgggcgacatcgcaatcgactacacgcaatttgtagaaatgactttaaacacaaagaacacgattacttggtaaaccatgcttgaatttaataacaaacaaatagaaactgacaaacaaggttatttacttgactcaaatgattggtgtgaagagcttgcaccaatcattgctgagcaagagaatattacgttaagtgaacagcactgggaagttgtgcactttgtgcgtgatttttacttagaatataacaccagcccagcaatccgtatgctggtcaaagccatggcccaaaaactaggtgaagaaaaaggtaatagtatgtacttatataaactatttcccaaaggcccagctaaacaagcaactaaaattgcaggtttgcctaaaccggctaggtgtatttaatggtcaacaaagccaatagcaaaccaagtcgtagtagcggtcgaacgtattcaaggcccacgcaaaaacgccaagttaaaaaagcaatcagtccagagcagcgcaaagtagtgctgtttaacaaaccatttgatgtgctttgccaatttactgatgatcaaaaccgcaaaacgcttgccgactttattagtattaaagacgtgtatgcagcaggacgcttagacagagatagcgaagggcttttgctacttacaaactgcggcaagttacaacatacactcactgaacccaataaaaaaacagctaaaacgtattgggttcaagtagaaggcgatgtcagtgatgaggctatttttgccctaaacaaaggcgtagaacttaaagatggcatgaccaagcctgccaaggttaaacgtattgatgagccatccgtttggcctcgtaccccgcccgttcgcgagcgcaaaaacatacctaccagctggttggaaatctctataactgagggacgcaatcgccaagttcgtcgcatgactgctcatgttggctttccaactctacgattaattcgttacagcattggtaactatactctcgatggtttggatagtggtcagtttaaagtagtgaacaatccagatgcataaacctaatgtcacagtcgcggctatcgttacatgcgaagataagtttttacttgttaaagaacgcgataaacacacaggtgagatctgttataaccagcctgccggtcatttggaggcaaatgaaaccttagctgaagctgcttgtcgtgagcttattgaagagacaggtattagccttaatgccagccatctggttggtatttacaatttacatgcggctaatggcgtccattatatgcgttttagctttgcttttacttgcccagagctatatttaccatcaccccaagataatgacattctcagtgccgattggtttagcattgagcaaataagaaacttaccacttagaagcccgctggttttaaaatgcattgaagatcatttagctggccaagtctaccccctaagtttgatttaccaataaccgctgtgattttggctggtttgggcgtctaaaagtatgctatatccaacccactattacttgcaatcaatgccttgcctaaatcgcttttaattccaactgaaactcgcatcttgaggtggtttgggtatataataccgccctttccatagcagttaaaaatgacagcgaatattatgagcgaaaatagtcacattaaagtcatcgtgggtatgtccggcggtgttgattcttctgtatcagcgtatttattaaagcagcaaggctatcaagttgaaggcctgttcatgaaaaactgggaagaagacgataatgatgaatattgcgctgcagctgaagacctaaaagacgcacaagctgtgtgcgacaagctaggcattgagcttcacactgtaaattttgcagccgaatactgggacaacgtatttgagtactttttagctgagtacaaagcaggccgtacgccaaacccagacatcatgtgtaataaagaaatcaaattcaaagcatttttagaatttgcagcgcaagcactgggtgcagattatatcgcgactggtcactatgtacgccgcgaaaaacatggtgataaatttgtcatgtgtcgtggtcttgatgacaacaaagatcaaagctatttcttgtacacattaagccatgagcatattgcacaaacacttttccctgttggcgacattgcaaaaccagaagtacgccgtattgctgaagagcaagatttaattacgcatgataaaaaagacagcactggtatttgctttatcggtgagcgtaaatttaaagactttttacaaaaattcttaccagctcagccaggtaaaatcgaagataccgatggcaatgaagtgggtgagcacgaaggtttgatgtaccacacactgggtcaacgtaaaggtctattaattggcggcatgaaagaaggctcaggtgaaccttggtacgttgtagataaagacgttgagcgcaacgtactagtagttggccaaggtaaagaccaccctcgcctatacagtaatggcttaaatgcaaatcaacttcactgggttgaccgcgaaggccctaaagggactacgcgctgtacggttaaaacccgttatcgccaagaagatatcagttgtacattactcgttggtgaagatggtatggcacgcgtgttatttgatgagccacaaaaagccgtgactcctggtcaatcagccgttttctatgctgacgaagtctgcttaggcggtgggattattgattcggtgatcaaataatgacagagcaccaagtcatggcgttagctgccatgtgtcaagttgccaaacaagtacaaaaagttgcgcaatatggccaaggtagcgaccacgaattagaaaagttattaaactgtataattgaaacatcaccaaatagccctgaagatgtgtatcagggtaaacataatttacgtgaaggttatcgcattttgattgcacagctttctgccggcgcagacaaagacgtcgaaatcgtgaaatatgtgggtggtttaatgcaattagaacgtgcattaagttcaaaacaaaacagcttaaatgaattaggtcgtcgcattgatgatgttaaacgtcgcctcgaccattttgctatcacagatgatactgttgtagcagcgcttgctgatatttactcatcggtgctaagcccccttgggcatcgtattcaagtttacggcaagccagagttattaaaacagcagctcacgcaaaacaaaattcgtgccctattattggccggaattcgtagtgccgtgttatggcgacaaatgggcggtaagcgccgtcattttttctttgcaaaaagaaaaatcctcgctattgctaaacaatcaatttaattatcgttcaaactagacaatttaggagtcattatggagctttcagcgttaaccgctatctctccggtagatggtcgctatggcagcaagaccacggaactacgcagcattttcagcgaatttggtttaatcaaataccgtgtaactgttgaagttcgttggttacaagctttgtctgcagcaagcgcaatcacagaagtaccggcatttagcgacgaggctaatgctttacttaatgccattgttgataactttagcgaagcggatgctgcacgcgttaaagagatcgagcgcacaactaaccatgacgtaaaagcagttgaatacctacttaaagagaaagtagctgacaacgcagagctaaacgcagttaacgaattcattcactttgcctgtacttcagaagacatcaataacctgtctcacggtttaatgcttacagaagcgcgtgataaagtattacttccatactgtgaccaacttctaaatgcattgaaagaaaaagcagttgaatacaagtcagttgcgatgatgacgcgtacccacggtcaacctgctacgccatctacaatgggtaaagagtttgcaaacgtatacatgcgcttaaagcgtcaacgtgaccaaattgccaaggtagaaatgttaggtaaaatcaacggtgctgtaggtaactacaacgctcaccttagtgcttacccagattacgattggcacagccacgctgagcaatttgtaacaagcctaggtttaacatttaacccattcacaacacaaatcgagccgcatgattacattgcagagttattcgatgcagttgcacgtttcaacactgtattacttgattttgaccgtgacgtttggggctacattgcactaaaccactttaaacaaaaaacaatcgcaggtgagattggttcatctactatgcctcacaaagtaaacccgattgattttgaaaactctgaaggtaacttaggtattgctaacgctatctttactcaccttgcgcaaaaactacctgtttctcgctggcaacgtgacttaactgactcaacagtgttacgtaacctaggtgttggtatgggctacactttgatcgcttaccaagcgacattaaaaggtgtaagcaaacttgaagtaaacgaagcgcgtttactagaagagctagaccaaaactgggaattactagcagagccaattcaaacggtaatgcgtaaatatggtatcgaaaagccatacgaaaaacttaaagatcttacgcgtggtaagcgcgtaaaccaagaaatcatggctgatttcatcgatggtcttgagttacctgaagaagcaaaagtagaaatgaaaaaattaacaccggctaattacattggtcgtgctgttgagttcatcgacaacttagcttaaattcaaattaagacttaaaaaagcgaaaggccttcctttcgctttttttatatcaattcgcttaggtcatgttatgtatcaattaaccatcaattcattaacccaagagcaatttttagctgagtattggcaaaaaaaaccattacttattaagcaaggcttcaaagattttgctgatcctattgagcccgaagaacttgctgggcttgccatggaagaaagcattgaatcacgtattgtgaccaatcactcagatgattggcaagcataccatggtccatttgaagactttagcttgctaactgagaagcacgctacgttactcgtacaagcggttgaccattggcataacgatgcagcgcaactactggaaccatttcgctttattccaaactggcgtatcgatgacttgatgatcagctactctacgccgggtggtggcgtgggtccgcatttagatcaatacgatgtgtttattattcagggcgaaggtaaacgccattggcgcgttggtttacctgatgcgaacttaaaacaatttgcgcaaaataaaagcttattacaagttgagcaatttcctgccgtgatcgattgtgtgttagaaccgggtgatattctttatattccaccaggctgcccgcacgagggttacgctgttgaaaatgcacttaattattctgtaggttttagagcaccaaaccaacgcgacttgttatcccaatttgcagatcacctgattgatactgagcttggtaatcaacgatatggtgatccagagctaaaattacgtgcctcaaaaggtgaactaagccaaactgaagccgaaaaagtgaagcaattaatgattgctgcaatcaatgatgactcagtatttaagacatggcttggtaatagtatgagccagccaaaacatgaaatggacctagcaccactagaagaaccatacacgcttgatgatgtaaaagcactgttagatgatgatatgctcatttttgaacgcttaggtggcacacgtgcaatttatcaaatcatcgatgataaagtgctttttagtgttaatggggtcaattatatgcatgatctagaagatctttctctaataaaaagattaacagaccaaacatcactgaccgctaacgacataaatagttcaaaaaataaccacattttcctaaaaacttttactacactattaaatgagggtatttggttttgttaggagcgtgtttatatgggctacatgatagatgaagttgaatggagtatcgacaaggaactattgcaacaaatccgagagagggtatttgtttgcgaattacatattccaaaacacgtcgaatttgaccatttagataaaacggctcatcacgtacttgttactgatgaaagtaataaatgtccagttgcgactgggcgcttgtgtaatgatggcttaattggtcggattgctgtattacctgaacaccgtaaccgatcggtttacaaatcattattgaattacttagtaggtttagctgaaaaacaaggctgtgattgcgttagtatcaattgcatattaaatgaagttgatcgatttaaacgaaatgggttttcagctgatggcttagtatttatggaggcaggaattccaagacaacggatgctctgccctatcaagcaatttgatacgcggccattcactttggtgcactagatggtttaaaaagctgaatataattattcagcttttttatttaaagttaagctggctcattttgccacatatcatctttttcgaataactcatataaaccatgagcgcggttaatgagtaaattagcaaaatctacttttgtcttatctacagcgcccgactgcattagttgatcagcctttagttgccattgcattgagaaatatctaagtacttcacgggcattggttgctgcacttgcttctgcgtgatcggttggtaaacgccctgtgataacccaatagcttttaccattttgtgctttaaacttccaaatagccactaatggcgcaatgaaacggctttctttctcaacaactgtttgcgggataacgcctttttcagctagatgcttttgtgcattctggaaacattctctttgccacataacactttgtttttgcgcttcggcttgttcttctggtgttaatggtcttgcttgtttttgttccatggtggttactcttttacaacatttctgacactttaaaatttaaaatggcgctgtgcaagtgtttacgggcaatcaaaggtcattttaatttacttgcctactattcagtcaactcagaaagaagagttaggttgagttaaaaattgtagctcttcaggtgttgattcacgacctaaaattgcgttgcggtgtggatagcgaccaaacctatcaataataactttgtgctttagttcaaattcataattactcatgcctttaaacaattgctcagcctgctgatgaataactttggattcactatgcataaacggcatataaataaacgcagcttgagagctgggcaactttttatcaaagccaagttcaattgctctttgcgctaagcttaatgcttgtggatcttggctaaacgcctgtgcagtatttcgataaatattgcgtgaaaactgatctaacacgataatttcagctaaagagcctagggcatccactcgccagtcagcatgctcgccagcgataacttgcaatagacattctgaaaacttaaccgtaattaatgcatcagtgtcatcagattgcttataccaagcatctgagcctaattcattaaaccaaaaatcgataatcctttgcttatccataaacattccttaattaccgagtacttttgctgggtctactcgggttgcttgccatgcagggtataatgttgccaaaatagcgaggacgaaggtaacaatcaccgtgataacaatatcttgccaaacgagtttactaggtaaaaactcaatgaaataaacaccttgtaatgggttatcacctaacaaatgactgatccacgagaataattcactgatatttaatgcaagcataacacctataatcgttccaagtattacgccaataagtgcttgcgtaaatccttgcataacaaaggtcgctaaaatcgtactgtcttgtgctcccatggttttcaaaatcgcaatatttgcctgtttttcgcgtacttccattacaagtgatgaaacaatattaaaactagctacggcaataattaaaaacaccacgatatacacaatagttcgaaccatttgaatatcttgatataagctgccttgcgttctgaaccaactagagacatagacataatctgggataacttgccccacccgcatagcggtttggtgagcagcaaatacatcagctacttgtaaccgtaaaccggttacttggttttcatcgaaactcagtacactttgcgctttgtcgaggcgaataaaagccgcagtttcatctatcgggccgcccattttaataatacccgcaagattcaaactcacccgctttggagcaagtaaagtgttactttgctggtttatctgtgggattaataaggtaactgggtcgccaattttaagacctaaccggttgactatttgttgtcctaaaagtacatcctcttgttgtaactgactaactaagcgcccttctgtaaattggtttaacgccgatacttggttttcaaactctgggctaacgccacgcacttcaaccgcttttaactcacttttaaactgcgccatgccgttgacactaataaaaggtgctgcacctgttacaccggcttgagagcgcaataaagcaacttttgactgccaattattgattggtttattaggagcaacgtattcaacctgcggtacaaccgataaaagccggtgcactagttgttgctcaaagccattaatcactgaaagagcaacaattaacacggcgactcccaaaagtatgccgattgtcgatgctttagcaataaagcttacaaagccattttgcccctctttttggccactgtgagcgcgaaatcgttttgaaataaaggcactaagcaacatgctgagactctttaattgcaagcttaccatcatctaaataggcaattttgcctagtttatctgcaagctctaaatcatgggttaccacaacaaaactagtttttaagctggtatttaactctttaatcaagtcataaatcttaattgcgttttgtttatctaagttacccgttggttcatcggctagcaccaacgcaggctctgttaccaatgcacgtgctattgcaacccgctgcctctcaccacctgacaacgccgatggtttatgttcgcaacgatgagataaccctactttatcaagcatgttgagggctttttcgtttgccgcttttgcgcttaaacctttaattaaaagtggcatagcaacattttcaatggcagtaaattccattaataaatgatggaattggtaaatgaagcccaaattttcgttgcggaaactcgcttgttgttttcggtttaatttagcaacctgctggcctttgatttcaacagttccatctgtcgcattatctaaggtgcctaatatatgtaataaagtacttttaccagaaccagaactacctacaacggctaacatttcgccctgattgagcgttaaatcaaccccttttaagactgcaacctgattatcgccatcttgatacactttattaagctgctgacaattaatcactaaatcactcataacgtaatacctctgctggattcacttttgcagcttttcgggcaggatacaaagtagctaaaaagctcatagcaatactccctgcggcaattaggctcaaactcataacatcaaatttaacgggtaaactcacacccgctaataaattaatgcctaacatattcaataactcatttatattgctacttaatagcacgccaagtaacgcaccaatgctggtgccaataacaccattgtataaaccctggatcataaatacatgctgaacttgcaaaggagttaaacccagcgtttgtaagatagccacttcactttgtttttcacttaccatcatggttaatgcagaaactatattaaacaccgcaacaagcacaattaaaccaagtaacatagacataatgcgcttttccatcgccacagcggcaaataacgtcccttgactagctcgccaatcagttactgtgtaatcatttaaaattgctgtttgagattgcaatacttgctctacagaaaaaggttcgtacaaagagatactcaagttgggtgctgctgattttgccagctttaaaactcggcctaacgaataaccactggtaaatgccaatgacatatcaatttcagattgtgtttcatacagtgcagcaacggtaaacaaacgttggctaggtactcgaccaaggggtgtatacgaactggcatttggcatgatcacccgtactttatccccaagcgaaatacccaatttacggcttaaatagcggctaatcgcaatgtgatagttactgtccattacttgtgaccaattgccagcaacaattttatcttttacgttatacagggagcttccttcatcatagagcccttgcaataacacgccgtgtaaatcttggttggtttgcaaaatggcttcgccatggcgataaaggttaacttgtttaatatctttagagtttgctagttgctgctgtaactgcaacatggtttctttcgaattatcttcagctgatacttcgatatggggaattaaaccaagcatgtttgttttgaggttattttcaaagccattcattacagaactgactgtaaacaaggccattaagccaatagcaatgcccgcaattgagaaaaatgaaatgaatgagataaaagcattgccctttgaggagcgactatatctcagccctataaaaaggctaacaggttgaaacataataagttatgaatattccaagggctaaatatgcgctcatgttagcatagatttagccagcatgggatgcgcgaaattgtaaaaaataattataaatctgatacttgaacagtagcgaccaaatggtcaagtaatgcttttacattggttgctataaactgcctaggcgggtacaccccccatacaccttcaggtgcaggtgcaacattcgaaagtacagcggtcaacttgccattggctaggtgctcattgacataataatccggtaattgcacgatgcctaaccctttaatagctgcatccaccaatgcccaaccactattacatgctaaacgcccagccactttaatatgcttatcttggccctgctcttttacccgccagtagctgttattaccgatgaggcaatggtgctgacttaattcactgacactgtgcggttgaccataattatttatgtattcaggactacaacatataaccagcctgcgttggctaatgcgccgagcttttaaagatgaatcctttagatgaccaagccgaatagctaagtcatacccttcttctaatagattgacttgctcattacttaaatgactgattacttcaatatctgggtgcttttgcataaatgtatgcaccgcaggcattatgtagctttcaccatacatgacaggggctgtcagcttgatgctgcctttaggtgtcagttgctgctcggcaagcagtgccgtggcatcatccatagcatgctgtaactgttttgtttgatgcgcaaacacttgcccctcttgcgttagcactactttacgggtcgttcgggttagcaattgtgtgttcaatcgttcttctaattgactcacataacggcttacatgagccaccgacatacccagcagtttacttgcctttgtaaaactaccggtttcggctaccgctaaaaattcatcaattccgtgccaacgattcattattaccatactgtaaaagtgttttaataaaacgaagattatcattcattgagaaataaataaaatagactaagtttattacttacttccaacaactataagggaacgttatgactgattttattaaatcaaaagcggctatcgcttggggtccaaatcaaccactctcaattgaagaagtggatgtaatgatgcctaaaaaaggtgaagtactggtaaagattgttgctacaggtgtttgtcataccgatgcattcactttgtctggtgaagaccctgaaggtattttcccagcaatccttggccatgaaggcggcggtattgttgaagctgttggtgaaggcgtaacacatgttgaagtaggcgatcatgttatacctctttacactgctgaatgtggcgagtgtaagatgtgtaagtctggcaaaacaaacttatgctctgcggtacgtgaaacgcaaggtaaaggtttaatgccagatggcacaacgcgtttctataaagatggtcaaccaatttatcactacatgggttgctctactttctctgaatacactgtattacctgagatttcacttgctaaagtgagcaaagaagcacctcttgaagaaatttgtttacttggttgtggtgtaacaaccggcatgggtgctgtgactaaaacagcaaaagttcaaaaaggcgatactgtcgctatttttggccttggtggtattggtttatctgccatcattggtgcaactatggctggcgcaagccgtattattggtgttgatatcaataccagcaagttcgaattagctactaaattaggggcaactgatttaattaatccaaatgactacgacaaaccaatccaagaagtcattgttgaaatgactgacggcggtgttgatttctcatttgaatgtatcggtaacgttaatgttatgcgctctgcccttgagtgttgtcacaaaggttggggcgaatcagtaattatcggtgttgcaggcgcaggtcaagagatctctacccgtccattccaactagtaacaggccgtgtatggcgtggtagcgcatttggtggcgttaaaggtcgctctgagctaccagagattgttgagcgctatatgaatggtgagtttgcgttgaatgatttcatcacacacaccatgaaactagaagatatcaatgaagctttcgacttaatgcacgaaggtaagagtattcgctcagttattcattattaatcttttaattttgcgctaggttactacctagcgcttttgtttcaaggatgtggttatgctagaaaacataagctcaacaaaagtcagcggtggctggcataaacaatatacccaccaagctaatagtacacattgtgccatgcgctttgcgatatttttaccgcctggtgccagcgaaacgaataaagtacctgtaatgtattggttatcaggtttaacctgcactgatgaaaactttatgcaaaaagcgggagcttttaaaaaagcggctgaactaggtattgctatcgtcgccccagatactagcccgcgcggtgataatgttcctgacgacgaaaactacgattttggtcaaggtgcaggcttttatgttaatgcaacccaagcaccttataatgtgcattacaacatgtacgattatgttattgctgagttaccagcactgattgaggcgcacttccctgttactaacaaaaaagccattgccggacactctatgggtggtcatggcgcgctaatgattgcacttaaaaaccctaagcagtacgttagcgccagtgcttttagcccaattgtgaacccgatgaattgcccttggggtgaaaaggcgtttagcaattaccttggcagtgataaagcaaattggctcgaatacgatagctgtgagttaatgaaaaaagcaattgctgacgattatttaccgatgcgtattgatcaaggtgaagccgataacttcttaactgagcaactcaaaaccgagaacttatttgctgtcgtgaacgaaaaagattacccagctgaaattaacatgcacgctggttatgatcatagttacttctttatcagcagctttattgatgaacacctaatgtttcatcaaaagtatttgtaataagtaatgactagtgtgaggtctttatttcctcacactctttgatactttgactgatttgcctgcaaaccagttgcggttctttgtctttcggttttaataagccaatcacagcactgtcaatttcaaaacctagctttgcgaatgagaaaccctcgggatcttttattgtagtcttagcatgatttgcatttgtatttccaagcttagttgatggtgagttttttgcagaaccatcaataaaggctcccgccaaggtacaccccgttaattgataaattagtgagtagataacaagttttgagaagttaatcttcattgttaaagctatccatcattgtaggtcttttttcggttcagctttaaccacaacacattcttttatgacatggtttatttgacaacaattaagcatgggtcctccaatacacttaagcttattttatgagcataatagcaaatgcttaattttactgtaagaaattgtagtgataccaactcgcttaattaagtgatctactttgaggtaattgttcttgggttggtattaatcacaaatatcgcgaataaactcttttaaaaaaccaaccagctgcaataaaaatattagtaagaaaggtaaagcgcctaaaattgcaacgctacgatttaagggctcatcttgtaacagtaataatgaaaagctgcatataaataaagcaaaacaccatgcgtagagggtcacacgattatttttagctccaacaagctctcttatcactaaaattgcagagtcagctgaggttgccacaaataccaagagtaataacaaacttgaccaaataaacacggtcccttgccaacctaattgatgaaaaaatacaaataggccttggctgtaatcttgtctaattgcagctaaaatgcctgcttgattgagtctatcccattcaatcgctgcgcctgaaaaagtcgcaaaccagataattgtgactaaagttggaatgcacacaaccgccataataaattgccaaaccttacgcccctgactaattttggctaggaacacgccgacgaatggcccccatgctaaccaccaaaagtagtaattatatgtccaatgattggcccaatctggtgtttttaattggctatcaaattgccaagtgccggtcgcaagtaactgtaaatagtagccggttccatctaatgcaattttaataataggcgcaatcggcaccactattagcaaccaaacgagcaaactaaatgccaaaagcacattaaatatgctcagtgattgcacaccgcgacgtaaaccaaacttaaccgacagagaataaataactgctaacaaacaaacgattaaagacccaactaataatgttgaagtaacacccaactcgatctcaacacctttactgatcagtaaagttgaatttgctatggtccccactacaccaaaaaatatcgagagcaccgcagttaattttacaataaacgagactgtatattttgcagacctatcaaaccggttgccaagtgccgttaaaacaggagcacatatatctcctgacttaccactgtactgtgttaacccgccaagaactaatgcaaagactgcataaagagcccaagcatgagcgccccaattgaccaaggttaaagccaagctacttgctagtctgtctgggtataagctttgtttaagtggtgggtcaagggagtgtaatgcaggctctgctacaccccaaaaaaccaaccctgagcccattccagcagcaaacagcatagcaaaccaaccaaagtttgaatactcgacaacagcatgttcgccaccaactttgcggcttcctaatggacttacggctaatattatgatggcaaacaataaaaaattgatcatcaagaaaaagctactacctatccactttaaaaccatttgtacaaacggttgtacttgctcagtgataatgtccggcaatataacagcaatgagagcaccaaacatacacagtgcaagcgcggtcttttcaagaggtgaggtggaatgtttcaaagtgaagcctatttattcagcgtgattagcatactgttagcatggctgaaattcaaacagccaaaagactgaaaaaatgacatagcaatgcgtaaaaagcgcaaattataccaagccttactttttaaaacccggctacatgtccctagtttcctcattttattaaatttgttgatcgggtattgaaattgcagctcagtcaaaattaacatcgcaaggagctaagtatggactttaattttgattggtatgaaattctcgataatttaattcacttagggattgcatatttacttgccttgcccatggcatttgaccgtgaaaaaaccagtaatggcgctggtcttcgaacttttccgttagtagccgttgcatcttgtggttatgcattagtaggcatgtctgtattaacaagctcagaggcagaatcaaaagtactagaagggattatcacaggtattggctttatcggtggcggtgccattttgaagaacaaaaattcaacttatggaacagccacagcagccagtatttggaatatgggacttattggcatagctgtggcattcagtcgctacgaaattgcctttttaatggcattaattaatttcgtaacgctaaggtatgttaaacgcttaaagtaaacagctaactagcatcgtatttagagttaacaatggcatacccggtttgtttaactttaatttcagctgggtttgcagatttaactaataaaccgcagcgtctactttgctcatcaatgacatagttaactaactcactggcttcaagatcaatgacttgatcagcacaacggatctgtaatttagttacatcacttgcgccctctatcttgatagaaccgcgagacaaagataaataagacagcttatcttttgaaacactaatttgtgaattgatttgcggtgtgcgggctaacaagtcatcaatttgcttaattgtagcaagtttgttttcttctgagaattctttaccttcgatattatcaagtgcataaatagcattgtaagcgaggttaaaatcgcccttaaagctataccactgcagagcacttttagcgactaaatactgaatatctgttggtaattttgctcgcaataaataggctatcgacaattgctcatcaaagccaaaccattgctgttggtagtaataatattgactttttaaccaagcaaataacgcctgctcagaggtgtttttggtatgatctttatataacttagccaatgcctgctcagcttttttaaactctttggcttgcagcattttattaatttcatcgtattcattaataaaaccacggctcgctttatcatttgagtaaccgttaaaatatttccctacttcaaatgaaaatagatacccaccttcaactgttttaccctctttagtggctggtgcaaactctaaattagttaaatatttctctgcgttttcttcactaccacgggtatcggaggccatgatcacttcaatgtctttcgctttaccttgtgtgtcaactacatacgacattaacgcccacccttctaatcgagagccattgtagctaccagcaaaacgcggattttgatttttaacgatataggccgatgtagcagcttgtacgtcaatacctaagtcattaacgtctcgtgctaaagtatgtgttggtaatccgattagtgaacaaagtacagcaaatttagtaagtttgatcatgagtaattgctccaattcccttagataggaacatttatagcactaaaaaaggcgctttaaaagcgccttgctgtcaagaatgtgcttaaacatgtcttgatcttaaaacatatcctggtatgggtttgattttgttaacaaaatcctcttatcaaaaccagggattgtcattgaatcttcacaaatttcaatgtcattttcgtcaattagtccatcaccaaaacgatatataagctcataatgacctaaatcagcctgtttttggtagtcagcttgggcttgtgcaacttgagtatgacggtcttgatattgcgccataaccgcatcaccatgacgctttgctagcatttttaatgtgattgttggtgaaagtactgttgccgttgcgttattaccaccaaatcctttagagttaataaatgcaatgtccattgcatcgcattggtaatgttgagtacgaatatctaaatgctcgctataaacgtcatccgccactttatcgattgtcgtgatacccggcataatattatgactgaacacacctaacgccatagctaactgatctccactagctggcgctatagtatgacccacatacgccttaggtgctgcaaccttccaattatcaatcgcaaatgtctgtgctactttatgataaattaatgattctgttacgcgattttgtggcgtgctcgagccatgtgccaaaataaagcttcgtttttgtaccgcttcttgaccaacaatactgctcgccaatgcaacagatttagccattgtaatatagttaccaggacccggcgctgtgattgattttttaataccatctgcgttgacaaacacatcaacaacgctacctaacacatcagcacctaactctaatgccagtgcatcatccattaaaattgcaacctgtgcaccttcaccaatagtaaagccacagttttcaccgaatggacgacttgtgcggcgatgatcaaccacatcagtattatcaagacgctttaaaccttcttcatttgcaagcgcactcatattaccaaaaccttcaacgatttctggcgtaatagcacactcaacagacgctacgatagctactcgtgtacgacccgcttgaatatcgtttactgcggcacgcaggttatataaaaacgtggcacacgcacctgatgtggtaaaagttgtacccacattacctgttacataggcattgataaagtcagtcgacatggtgtttaagccaagtgcaagctgtttagtacttacgcgatcgccctgttgacgcgcacgtatcaatccaccaaaaccctcatcatcaacttgacctgccacagaagctgagtatgtaccaatttgatcaggctcaacactgttcattacctgctgccacggcagacctgttgaacgaatagcatcggttgcggcaaagatagttgcttgtaagcctcttggttgataacggctgttatacatagctgaaggttcaaaacctgtcggtaattgacctgccgctttaattggattatcacgcgtgctgtcatgcttgatagcaagatcagcactaatagtgactttcacttttttatcactaaggtcttcgacctgccaacttgctggcactggagatggtaaatcacgacgacgcgtttcaaaaacaatctgttgttcatcagacgctgttaacgtcattttttgctgccatggcgttgcatctacatcgaagtgatttttttcaattttacgaataagtgtgccagctaaaatttgctcgccaaattgtgtttcaatatctgcttcattgacggtattaccatttgcatcttttaaaacaccgtctgtcaatgtaactaaattcattaaagtcgctaagcctaaaaatgtctcctgacgggcttttgcgtccaagctgtctaacacgatacgacgataaccttgatgaaaagaagtgcggccagcggcattaataccgcccataccaacaataacgggtaatgctgtcataatttaccttgagaaaacgtgttacgataattcgcttaagtttaaatggattaattaacacgctttatgcttaaatagccaaatattatgcatgaaatgccaaaaacaactggtcggagcaattaaagtgacaaaacttcaacaaactaaagccaccgaaatcagtatcttggtttatccccatttattaattaccagcctcacgctaccaattgagatgttgagggctggcgaagcatttgccaaaagccatcatcagtctcaacagttttgccctctaaatatcaacttagtagccagtaacttggcgcctatacccaacagaacggggctggcaatcatacctgactgtgaaacagtcaccgcccctacaagtgatttaataattgtacctggcatctggcgtaatccgcgtcctgtcgtcaataaacaaaaaaaattagtgcaatggttaaaggattcatggcagcaaggaagtcatattattggtgtaggcacaggtaattgtttagttgcagaagcaggactactggatggtcaccctgctaccactcactggcattacgcagagcaatttaaacgtgactaccctaaagtccagctcaagcctgactttttcatcacgcaatctgagcggatgtacacggttgcgagtttaaatgcgcttgccgatgttattgtgcatattattagtcaatattacggccgagaagctgcacaacatgttgagcgtaatttttcccatgaaatccgtaagccatatgaagatcaacgttatcttgagggagctgtcgataagcatcctgatgaactcattgctcaaatacaattttggttaaaaaacaacctaacatcagagttatctttgcaagaaattgcagcacaattcaacctaagctatcgcacctttactcgacgctttcgccaagccaccagccaaacccccattgaatactggcaacaacttcgcgtgcaaacagcaaaagaattactcgcctcttcaaacttatcgattcaagaagtcgcccttgaagtcgggtataacgaccaaggtcatttaacacgggtatttaagaaagtactatcacaaactcctagtgaatacaggacagttgtgcgacgtaagttattcggataacaagtaagataaactcagaaacttttgaaaatatcatttaagtcaagcattaatttgccgaaattaaatttgtaactaagctttcagatagcagtaattttttctctgagtcggaaataatgtatcaacctgattataatgaattagtacaaagttggaataaaacccttgaggttttagcgatgtttgcaaaagtgcccgttgctttaattatgaaagttgaagacaacgttatcagtgttttttcaaaaaatgatcatctcgaaaatccctataacatcggtgattgtgaaaacttagatggctctggcctatattgcgagcatgtcataaaaacgcaaaagctattatcaatatctaacgcactggttgatgaaaattggaaagataacccagatataaagttaaatatgatttcttacttggggttacctatatcagccggcgatgcgaccccttttggtacaatatgtattttagataataaaccgcatagttacagtgaacctgttattaaattacttgaaaccatcaagcatagttttgaagcccaactaaaattacttcatcagcaaaaacaagcatttgaacaactacagttcgaggagttggctactctaataagagggattgcccatgaactcaacacaccactcggtaattgcataaccgcagttgatgtggctaatttatcaattactaacacgcagcaaagtcttgaaaataaaagtttaggccaaaaagctctatataaggctcttgaaacaatggctaatactaatgagttattaacacggaacctcaccacctgtgcccataaaatacgtattttacaagacttgctatacacaaaagctcaatcatcaaagtctccctttagcctcaaacagttagctgatacattaactaaccatttaacacaaccacttaaagatacgaatgccaagcttgaggttagttactcgccttccaagtcagaatgtgaaattgaaatagatttactaaaacaagtgctgttcattttgctacaaaactctatggagcacgcatttttaggcgttgaaaaaccgcgaatcaaaattgatatgcaagattacaatggtatattgaaaattcattacactgacaatggcatcggaatcgaagatgatcagatcaacgctatttttacacctttctataaaggaaaaaacaaccatacaggaatggggttaggtctcagtattgctaaaaaaattgtaactcagcaactacaaggtaatatctcagtaatagatagcaacgagggagtacactttttattaagcctgccaaaatagtgagtagtaaattgcagaaaatggctattttcaaagggtgccttttagcccatatttctttttgcagtttaactttatttgcagaaccaaattatcaagaagtaaaacagttaattgacctacattttatccataaaactgattatgctaataaagcagcttatctcgaatatggtaacttaaacctaaaatcactcataaaatcacttaatgagccgcattcttacctaaaagttaaaggtttaaatacaactttctttagcgccaaaaaacgctgtgttaataacagtaaaattaagctgaattttcaaaaaggtaaacttgcttatctaaaggtttccagtattggtataacaaccacggaagaaaaatcacaatatgttagtaatttaattaataagataagatctcaagataacgagaactctcgatactggattattgatttaagaaaaaatagcggcggcaatatgtggccgatgttacaagcactttcccccttttttgacgctacacagacattaggtgaattccatttgtcatctggaagcattactagatttggttttaaagaaggaatagcccatgaaagctcgctacaaaaaatcaatttccaaccagacacctatcatttaaaacatcagcctattgggatttatgttttgattgattctagtgtcgcaagttctgctgaagctttagcaattggcctatcatcgcttgaaaatgtaacactcgttggcgagaaaacgtgtggcttagctaccgtcaatactccgtttgagctcagtgacggaagtattcttgttttaacaacaggcgagatggccaatattcatggtcaaacgtttaaaaatggcatcaaaccgagtatgagtagtctagaatttattaggctaatcaaagactttggagaataaaattttgctagcttgtgggcagcctctgtcttcataacccactattgcataactatttttaatcagcatactcagcattgcaggaaaacggttcatcgacttaactttaatagctcggtaattgtgctcttgaacccatgtttcttgtgcgtttaataatgcctgtgcgatcccctttcctctgcactttggcgctactgcgccaagccagctatagaaagtatttgaatctaatgcataacccagtttgtaggccacaggctcattatcgataaaggctactaaaattaaatactcaacacctgctatccttgcttgtaatttaccgagcgtatttttaccatcaaactcagaaatttgactatcaacaagtaacaaatcgtctaaactagcaggctttatcgtgtaacaaggctccatgactcactctaatctattatctaacttcacttttcttttcgataatacaactttgaatagcgttttacacgggcatgcacgccgcgacctaaacttttaaatttagcttcaagtacatcaacgccatacaaaataacgaccactaatactgaaagtttaattgcagctaacaagttatcggtggcaatcacaacaccaatagaggctagcacccagatagttgctgcggacgttactcctacaaccgcgccatcttttgcaagcattactccggcacctaaaaagccaataccggtgataatttgcccaactacacgtgaatggtctatcacatcgccatgtaacataaatgcagtagcaagaaataaataggtacccaacacaatgagtgctgaggtgcgtatgccaacaggtttgccgcgtaattgacgctccataccaataattgcgccgcaaaaagcggcgctaccaattgctgaccaagaataaggggcaatatcaaataaactactcagtgtcactgtacttccaaatcaaactaacaatcaaaattataaataaaaggccatcgcagtgctgagtcgtgatgaaccaaaactcgccattttgctaaaatcggctttggctattggcacgtgctgacagtcaatcgccaattgcttttcgttttcacagaatggatcatgaacatacaagcagtgctcatcaatatgggttacacacacccaatgcggtgatttttttccatcaaatcgataggtgctgatcaataacaccaccgctttaccctcagcaagccaagtctcaatagctgccaaggttaactcttgatagcgtactggcaacttggcagctattgcttcggccacaaattgattatgtaccgtatgcaaaatggcttttttcttttcgcttcttaccccgtcaataaacaaggtatcacgggtatttaaaataacatcagctttaaaaccacgtttcattgcagcaagtgctaaccctagagggtggcaaccaccatgccctgaagtcatgaagatagtcgtggcttcacgccaaatatccagctctttgagttggctcattgcggtatcattcaatgatgacattgccattaataacgccgctgggccacaggtaaattcggtagtttgctggtaccaaggtgtgtgtttatcggcattaaattcgatattacgacgaatgtttttttgcattcgatgggcatcactatggtcatcataataatcactgtaatgaccaaacacctgataacccagtttttcatataagcgaattgctgattggttgtttaccgcaacttctaaacgcatgtataaacggccccgtttagccgtttcattttcaagcgcaagtagtaactctgaagcaatccctttaccttgctgagattgcaaaaccgccagtgaatataaccgagcaagccgcgtccctttatggcaccacactaaaccataaccaactagttgattatctacctcagccaccatcaataagccgtgagttgcgctgatccagcgttttaagctacggctacttaacctatcttgactaaagctttgttcttcaatcgctacaagggccgccaaatccgttgcctgagcaaaacggatttggcaaacagatgcgttcattaaccgcggcctcgtgcttctaggcgttgtttaaactcatccataatgatcatataaagctcatcacctaaataagcatcttcgactttatggtcgatactcgggttgtcattcacttctaacacgtatgctttaccttgatgctctttaacatcaacaccatacaaacctttacccaccgttttacaggcttttaatgctgcatcaagtaccactttaggtagctcaaaggttggcaaggtctcaaaaccaccagagaagaaacgttttgcatcatggttgtaaatttgccagtgattacgcgccattaaataacgacacgcataaattgcacggccatttaacacaccgacacgccagtcgtattcggtgtacatgtactcttgtgcaagcaccagtgcactgaactcaaacagttcttttaacttagcaactaactcatcacgattagcgactttaaatacgccttttgagaaagagccttctggcatttttaataccagcggatagctgaagtttgcttctaaactttcaattgtctcttcacgtgtatcagccacaacatgagtttttaaactcggcactttttgataattaaaggcatcgtgcaaatacactttattacaacagcgcagtatcgattctgcatcatctatgaccactaaccctaagctttgtgctttactcgctaaacgataggttggatggtcgatggctgtggtttggcgaataaataacgcatcaaattgtgcaatattggtaatttcatcaaatgtcagtgcttgagcataaataccgtgcttagcggctgcttttataaatttagcaatggcatctttatcacttggcggcactttttcttggtgatcaaccaatatagccatatcccaacgataacgacgttttttatcgtgaatacgccacactgactctgtaaagctgctgagttgttttacaaactctgtaaagccagtgtcatctaatgatgcaattgtgccttgttttacaacaccttgctcatcacacaccaaaataggcgcaggatattgcgagaataatgctttggttgctttactttgctgctctttatctgtgtgaccaaaaaatacagtgccaccagcaagcgctttatgacgcgtgctgtgctcatcgctacgtagcgcattaattgtttttacacttggtaatacctggtgctttcttgcttcagcaagcaaagaacaataataacctttacttaaatactgccctgtatcacacaagtttaaaatgcgtgtttttggctcattatgttttgggtaatcacgtaagtaggtgtcaaaggtaatgacattttcgaaattttgagcaatacgttgctcattgttatcaaccacaatcaaggttttaaacacgacttttcctaaattaagtcttatgaaaaaaatgaaaacacccaaccaattaagtgaacgcatgaggctaaacttcacttaactagatgggtgcttaaaataccaatacgcgagaattggtaattgcgcgtattggtataagccttaagcttgatgtgatttatagagggtttttagctttgtgaccaacgagttattttttaccttaagatgaaatttattgattaataaattttcttggtcagcatatttctgcaatgctgtaaaactgcttattacctgcaattgtcagtgttacttcatcatcgacttgtttaccaatcagttgtttacctaacggcgcttctcgggttacaacataaatgggctgctgttttacggtgaccattaagccacctgcacttgggcctataaaaaaccactttgagttatcgtgctcatcgataagacacactaatgcaccttcgcgaaccttattaaattcgctttctttaaacactgtattaaatgcttgaatgtcacgatagcactcattgactcgctcagcttgcccttgcgctaaataagcggcttctaaacccaaggtatcgtattgagtttcagctacactttcttcgtgagttgcagcatcatgggccgcttttgccgcttctttggcgttatgcagttgtgcctctagcgcaaagcgtaaatgttcaattacgtgtgttttattcatatcaaagcagttaaaacagaaaagccgctattctatggaaaaatagcggctgatgaaagtaagttataaaactgacttacggcatatccatataggctttggttttatcatccagtgtttgggtgtaattttctgaacttaaccccaataactgcggcaaggtagcggcgatacaaatcgatgagaaggttcccaccacaatacctgcaaataacgcaatggcaaagcccgttaatgcagcaccagcaagcaaccaaatacaggcaatggtcgcaagtgttgtgcctgaggtgatcaacgtacgtgttaaggtagaaccaattgcatcgttaatcacaacatgggtgttaatccgttgattatctggctgaatacgtaaaagctctctgactctgtcgccaacaataattgagtcatttaatgaatagccaataatagccagtaaactcgccagcacggttaaattaaactcaagccctagcaaggaaaacaagcccagcactaaagttaaatcatgtaatagtgcaaccactgaacctaccgcgagtcgccattcaaagcgcactgcaagataaaccataattgcaatcagcgccgcaaataaagctaaacaaccttgttcaaaaagctcatcacccacttgtgagcctaaaaatgagctagataatacgctatattctacaccttgctcattcagctctgcttgccaagtactggctttgctagcctctggcgcttctcttaaaacaaagtgatattcacccgctttagtgatggttaatttgcttgcaacctcggggcttaactttgtctttaaatcagcaattgtcgtgactgacgttgtgttgatttcactgatgtagccacctgtaaaatcaaggccaaagttaagccccttaacagataaaacacccaagctcgcgatgactaaaatacaacttagcaatagccctaaaaggcgtgctttactcgctggcgttaaagtagaccaactcatgcttttgcccccgttaaattggttagtttaatgtagagtgtttggctaagcgcttttgaaatgtaaacgccagtaaatacgctagttaataggccgagcgctagcgtgatggcaaagcctttcacaggcccataacctatggcatataaaataatcgccgtgatcatggttgttacattggcatcaaaaatggtcgtaaatgcttggttataaccttgctcaatcgcttgatatgtaggtcgacctttacgcttctcttcttttattcgctcaaagataatcacattcgtatcaacagccatccctatcgtcagaacaagacctgcaatgcccggtaaggtcagtacaacacccggcaataacgacattaaaccaactaaagcagttaaatttagtagcaaagcaatattggcaatcagccctaagcgacgataccaaagcgccataaatgcaagggtaataccgatacccagcattaacgcagctaagccatgctcaatgttttcactgcctaagcttgggcctatggtttgctcttgtacaatggtcactggtgctgtgagcgaccctgcacgtagtaaaatcgctaaatcgtaagcagcttgtgggcttttcatattggtaatgctaaaacgagagcttaagtgctgggcaatgtttgccacattgatcacttcgctttttttcacaacttcgccattctcaccccgtgagtattcagaatacacagtggccattggcttaccaatattgtgcttagaaaaagcagacatcgcatcaccaccttgcgagtctaaactgagctgaactaaaggcttgccccactcatctttaccaacactggcattattgatgtgatcacctgaaaaaatcgctataggatttaaattaacaacgccaccgccttgcacattaaacgctttacctcctacttcgacgacctgataaaaatcgagggtcgctgttgcaccaataatacgcttagcttcagatgggtcttgcacaccgggtaactcgatgcgaatgcgctgcttaccttgtcgttgcgttaccgcttctgtgatgccaagctcttcaatacgaccacgcagggttgttaagctttgcgccataacttgtttattgaattcactttggctttgctcattaaaatgcagtaataccgtggttaggttattagtggttgatttagtttgcatcaggcctttgaattgaccttgtaacgttgagacgagccctgcgagttgctcctcggagcttggtaaaatttgtagctcaacccctccttttacaacacttgcccgaataccacgaattttatctttacgaagcgccaatttagtttgttgatacacactgcttaagtgctcttgcattgctttatctaagtcaacatcaagcacaaataacaccccaccatttaggtcgagtcccaatttaattggtgaaagacccagctgctgaagccactgtgggcttgtcgcatgctcaacaattttagcgtctaactgtgggtattgtgttttgataaagctcagcgcattggcactttgggttggctcgcttaataaaatagccagttgtgcttggctatcattggcttcagtcacttcaaaaccatgttgatttagtgacgttgtcacactttgcagcgtcacagtttgatctggcaagctaatgtgcaaccaagatttgttagggtaaaggttaggtagtgcgctaaccgctaataaaatacacgccgctatcatagcgacataactcatttttagacgacgccatagcgccggctttgatttatgtgacatacatgacttccttccggcattgtcagccggtaaaaattaattccaaaaatataaaagtaacgaaggaagtcgtttagttatggtaggtcgtattggctttgtacaaaagattagcgtctttccagccactaatacgggatttacgttgggttgctaaggcaaaccatgggatctcacgcacagcccctggcggcgctaaaaagtgctctttcccccaatcttcagcaaagaattcaattaatagctcgtaatcagggtcaacctgactatgataaagaaacaatgatgaattactggcagttaaacgcggcactagggtatcaaaccccgatggttctaccggcttaggatgttcgactgtatgagtttgggaaataactggggttttagtcagctcgacttggaacaatttagtcgcagcatagtgtgagtgattgtcaggcatagccatgctctgtgcactaaagaacacagtaaatagcaagataatgactgagaaaaaccgtaacaagaactgaccaataaattaagcggataacagggatatagtgagggtaaaaaaataaaacacaaggtattacttaaataaaagtaactaaaataaagcgagcctaactagacccgcttagttagtttaacttttttaaacaagttaaacttctaatgatgacatgtcgataacaaagcgtgaggccatatcaccttgctttaatttatcgaatgcgtcattaatttgctccattttgatcatttcaacttcaggcaaaatattatgtagcgcacagaagtcgaggatttcttgagtttgcgcaataccgccaatcaatgagcctgcaacacggcgacgccccattaataacggcacagagttagactcagcaagcgcaccgacttgaccaaccaatacttgcgtaccatcaatatctaaaagcggaatataaggtgtaaagtcgtgttttaccggaatggtattaatgatcacatcaaattgatttgcatgcgcttgcatggcatcttcatcgctcgataccaataaatcttttgcgccataagataaaacctgctgctttttcttatcactacggctaattgctgtaacatgtgcgcccattgctgctgcgattttaattgccatgtggcctaaaccacctaaaccaatcacaccaacacggctaccagggcccacattccacgtacgtagtggcgaatacgttgtgatacccgcacataaaattggtgcacatttagcaaggtctaagccttcaggcacgctcagtacaaattcttcacgcaccacaatgtgttttgaatagccaccttgagtgagttcaccgctaatgcgatcttgtcctgagtaagtccctaccataccttcgcgacaaaactgctcttcaccgtgatgacattggtcacagcttaaacagctatcaaccatacaacctacagcaacattatcgcccactttgtatttagtaacgccgctgcctacttcaaggacgcgaccaacgatttcatggcctggcacgactgggtattgagtccagccccagtcgttttctgcggtgtgcaagtctgaatggcacacgccacaataaagaatttcaattgatacatcttcatcacgaagtgcacggcgttcaaaatgatacggctctaatggtttttcagaatcatgtgctgcataaccgacggttttcatgcttactccttaattttcttcgtgtttaactcatgcaattaacaaatttgctaatgcgctggtgtatactgcactcagtatagaggtaaatttgcaaaatacacttgcctaaaacacgaaagcttttgcctatttttatcaaattgatttttaagagaccccaatgcgtggaatgagccgcaaagaacaggtgacgagatcgcctgatgcaatgaacctatcacaaagcatcaaaacactctggccctatttaatgacctttaaaggccgcgttattttagccgtaatggcgcttattgcagcaaagggcgccacattgctgatgccttgggcactaaaagaaataattgacgcggttgatgcgagtatcaacccgttattaagcgttcctgttgccttgctcatcgcttatggtttgctgcgctttgccagtgtgttttttggtgaagtacgcgatgcattatttggccgagttacagagcacgcaatgcgccatattggcttaaaagtatttaaacacttgcatagtttagagcttgcctttcatcttgacaggcaaacaggtggaattagtcgcgatatagagcgtggtacaagtggccttagttttttaatgcgctttttgatgtttaatatcgtaccaaccttatttgaaataatcacagtagcgattatttttgcgaccttattttcgccgtggtttgcactagtcaccgttatcgcggtcgctatttacattgctttcactgtgatagtaactcagtggcgtaaccggtttattcgtgaagcaaatactgccgataacaactctaatacccgtgctatcgacagcttactaaattacgaaaccgttaagtactttaacaatgaacaatatgaagcgagcacctacgacagctttttagctaaatgggagcaagcaaggctaaaaaatcgtttatcattactggcgcttaattcagggcaggcacttataatcgccgcggctattacagcgctaatgtggctaggtgccagttcagtggtcaataaagagctgacaataggtgagcttgtgatgatcaatgcctacatgatccagctatttttaccacttaactttttaggttttgtttatcgtgagatacgccgtgcgctgactgaccttgaaaacatgctcgggctattaaatcgaaaagccgccattagcgatgacaaagatgcaaaaccattaaaagcaaccaaagcagctatccgatttgaaaatgtctcttttagttacgacaaacaacggccaattttaaataacttaagctttgaggttacttctggcagcaaggtggccattgtgggtgccagtggcgcaggtaaaagcactctaagccgcctactctaccgcttttatgatgtggatgcgggcaaaatttatatcgatgagcaagcaatcaacacagtaactcttaagagcttgcgccaagctattgccatcgtaccgcaagataccgtgctatttaataccagcattcgcgaaaacatcgcctacggaaacccaactgcaagcgaagatgaaattgataaagcaataagccttgcccatttagatggatttattgccagcctagacaaaggcgataaaacccttgttggtgagcgcggtttaaaagtgtcgggcggtgaaaagcagcgcattgcaatagccagagccattttaaaaggctcaccgattttattatttgatgaggcaacatcggcgctagattcgcattcagaacaagccattcttagtgcgatgcgtgaagtcgcacaaaggcacaccagcttagttattgcacatcgtttatcaacaattactgacgcagacaaaattattgtgatgaaacaaggacaggttgttgaacaaggtcagcaccaacagctacttgctgcgaatggtgaatacgctcgaatgtggcagttgcagcaaagcgatgaataaacactgttaactagtgggttaaatgattagaataaccgctttatttttatctataacaaaaaggcaacacgcagatgggcagagcttatcaaaacaaaaaagactcaatggcaaaaactgcgggtgcaaaaaccaaagtttattcaaagtacggaaaagaaatttatatctgcgctaagaatggtggtgttgatcccgatggcaacttagcactgcgtcgcttaatcgatcgtgctaaaaaagaccaagtacctacgcatgtaatcgagcgtgcaatcgataaagccaaaggtggtggcggcgaagattacgtagcaactcgctacgaaggttacggacctggtaactgtatgattattgttgactgtttaaccgacaacaacaaacgtacctttgctgacgtacgtgtttgttttactaaagcgaatgcaaaaattggtgcgcaaaactcagtttcacacttatttgatcaccttgctatttttgtgtttgatggtgatgatgacgaagctgttttagaagcactaatgatggctgatgtagatgtaactgatgtagaagttgaagacggtaaaattaccgtatttgctccacatacagaatacaacaacacgcgtacagcacttgaagaaatgggaattactgatttccacgaagatctaattgcctttgtgccgcaagtagaagcaccgattgaaggtgaagacgttgaagtcatggaacgctttttagccatgctagaagactgtgatgacgtacaaaacgtttaccacaacgcacagttttaattaaaaaggccaaccaagttggccttttacctttttagcccaaaggaatcaacattgaataccctcgaagagttacaagccggttctctacaaggttgtacccggcttcagcttgttgcagaactaaccgaattcccaaaagaaatttataccctagccgatacgttagaaatccttgatttatcaaataaccagctaagtgatttacctgacgatttttacaaattaaaaaatctaaaacggctgtttttatcatttaatcagtttaaacatataccagacgtgctaagacaatgcccaaacttaatcatggtagcatttaaaggtaatcaaataactgaatttgaagcgcactgtttgccaacacagatagaatggctgatcttaactgataatcaaattcccgctttacctgaaacatttggtgagtacagcaagcttaaaaagctcgcactggcaggtaatcagttaacacatttgccagtctcaatggctaattgtaaagagcttgagctaatacgtttaagtgccaataaacttacaaaaattgaagattggcttttagctttaccgaaacttgcttggcttgccttctctggtaacgatttaaatcgctcaactagcttgcactgtgagctgtttagccaaatcgcactggatgaaatcgatgttaaaaagcagattggccaaggcgcatctggggttattcatttagccaattggcatcaacagcctgttgcccttaagttatttaaaggcgagatcaccagtgatggttatccactcgatgagctaaattgctgtttaaaagccagtgagcatccaaatctcataaaagcattaggctatgttgatgaagagtcacaacttggtttagtgatggagcttatcagtaaagagtttagtaatcttggtttgccaccttcccttgcaacttgtacccgtgacacattcgaagacaactgccagtacgcgccagaaatggtgctaaaaattgttaagcaaatggccagtactctcgctcatttgcatcaaaagcaagtaagccatggtgacatttatgcccataacagcatgatcaattcacagggcgatttattattcggtgactttggtgcagcaacagacttatcaattctgacgcctgatcaacagcagctactagaagggattgaagtgcgtgcccttggttacttcatcgatgatttactgactgtagtgactgaacaaaacgacattactaagatgcttgctgacatagctcaagagtgcttggtactcaactcagaaaaacgccctcgcctttctgagctagtttcgcgattatgatttagggtcattataaaaataaagcctcagtgaggctttatttttgctttttaaacggaaacacctgctgctttaacataccttcgggcatgtaatcgccaaccacaccatatttgtcaggccactctgcttgacctttgacagcagtgccaaatagataatctaaaaaagaaaaatgcgcagcatagttacggtcaatggccgctttatcagatgaatgatgccaatgatgaaactgaggcgtaaccagcaaatactttaaccaaccaaatttcacccgaacattggcgtggttaaacacggcctgaaagccaacaataatgacatagaggctaataacatccgatggaaagccaagcacaaaaataggcgtgagcactaaactgcgcgtcacgagtatttctaaaatatgctgacgagagcctgcaagccaatccatttcttttgcactgtgatgcacggcatgaaaacgccaaagcagtggcacttcatgataagccctatgcacaaaatattgcattaaatcggctactaaaatgattaaaaatagctgcagtaaaaatggcagttgaataataaagccttgcactgtatcagacacagcccagccaaatgcgtgatgcacgaactgattggttgccaacaacacaaaaccaataattaagtgattaacaaagaaatgatttaagtcaccctgccactcagagcggaggattttttgttctctacggtgcggcagtagcttttcaattagaataaaaatcagtgtggagccaagtaagtcaagaatgaaccaatcaagccccaagtacggcgtattatctttaaagtcgcccacttcaacattaggcccaccaaatgcaattgccacaactataaacacccaagccgttgcaccgagccgtttattagtattacgaacaaagttcaacaaccctaaactgcctgaaataatcaatgccacaaacatcaactggcgtaaaaactctacactgtagttttgcctgagctctggggtcgttaaatactcaggaaaatgaaaagctagtacccctaaacaggataaaaccgctaagaagcaagcaatatagccgcttatattgccttcacccacttgaaactgctcagccctaaatagccgatgataaagacgtgtcatgatataaaaatccatttatcaatttttttgcagcataacacagaagaatttaggaacaaatatacgctaagccatcacgaacatgtgtaaacaacaaattgatattaagctcagaaaacccaaaacgatgctgtgttcaggtaggtaatgaataatcaacgcaggcattgcaataatgtgtgaagcctttggcctatagcacaaactaagtttttcaaaactcatgaaagcattttttagctttatcaggtagagctttactccggccaaatgaataagaacaaatgtagatggacctaaaaactcaagtagcgccatgagctcatatcccatcattaactcaggtccagcaataagaatgactaaaactagcgcaattgacctatataacttattagcgaataactttttaattttattgagcatccatatccttatggaacgatttagacttatataatgttaagttttttaatattactgaaatgctttatcaaacttatcttgatcaaggtatttatcaaatgcacctaaagcattacccacacttggctcagccattaactcttgcattgcaacttcaccgacaataccgaacgcgttttccattgctccctgaccgccgacttcaatcgctgctttagcttgctttggacagtcttctgttaataaacgcgtaactaacgcaccaacatagcgattagtttcatctatatcttgctctgtcacgttcgagaaaggtttaattatactgtgcgttgacatacccagataaatccatttagcgagatttttccgctctttgccattcagtgaatcagttaaacacactgcaagttgctgagcttcttctgatgctgaagcataactaggcagtaacgacattacaaagagtgaagtagttaataagatttttttcattattttcctcataaactgggattaaccatagaattctacttcagtttttacaccaaagggtaaaatgaattctctaaattcagggtccccttgctgagcttttggatatttaaggttatacatattctttttaaacatatttaagaattgcttattttgcagcttattatccaatacactgactttgacaacatcacccgcttgattaaccatcatcataaataaaattttatcatcagatcgtctaaagtcgtcttttgcttttgttatcacatctttgggaatattaaaatctggtaggtttttatcttgtgttgatgagcaagacactaacaagaggcataaaggtattaaaaatttattcatcatctgtccctaaaaatgtttaaagacaaaatactgtgaataaatgcttttatccagtaaaaaccaaaaaagccacgataaacgtggctttgttggataaagcttaaacttttactgttctattataagaactgacctagcgctttaacttggtctaacatgcggtttgagaaaccccactcgttatcgtaccaagccattactttaacaagcttaccatctactttagtttgtgtagaatcgaagattgaagacgctgggttgtggttaaagtcgatagaaacaagcggtagttcgttgtattctagaataccttgcattgcaccttctgatgcagctttaacgacttcgttgatttctgctgcagttgtttcacgctttgcaacgaacgttaagtctactaaagaaacgttgattgttggcacacgtactgccatgccgtcaagtttacccgcaagttcaggaagcactaagccaaccgctttagctgcacctgttttagttgggatcattgactgagttgcgctacgtgcacggtataagtcagggtgataaacgtcagataagttttgatcgtttgtgtaagcatgaatggttgtcatgctaccttgctcgatacctactgtgtcgttgattgcttttgcaatcggtgctaaacagtttgttgtacacgatgcgtttgaaatgatgttgctgtcagcgtttaaaacttcgctgttaacaccatgaacaaccgttgcatccatatcagtaccaggtgcagaaacgattacttttttagcaccggcttcaatgtgttttgcagcagcttcacgtgaagtgaataaacccgtacattctaatactatatcgacgtttaattccttccaaggaaggtttgcaggatcacgctcttgcgtaagagtaatttcatcattaccaattagcatggtgttttcagcaagtgttactttttgagaaaattgaccgtgtactgagtcaaattgagttaaatgcgcgttaacatttgctggtgctaaatcattgatagcaacaattttgatttcgttgttttgagctgactcataaagagcacgtaatacgttacgaccgatacgtccatagccattaattgcaacattaatcattctaatatctcccgttaattattttacttcacttgcttggcgagcaagcgcttcaatggcttgccagtctttgttttcaataagttgtttatctaacatccaagtaccacctacgcagattacgtttttaagtgctaggtagttaggtgctgtttcaaggctaatgccgccagttgggcagaaagtcacttgcggtaaagggccaccaattgatttaagcattgctgtaccacctgccgcttctgcagggaagaactttaagaacttaaagccttggcttgctaatttcattacttcacttggtgttgctgcaccgggtaaaaatggaatatcagactctttagccagtgctaataattcgtcgtttacacctgggctaaccataaaatcagcaccagcttctacagatgcattaaatgtcgctttatcaataacagtgcctgtgcctacgaatgcttcaggtacagcttctttcataagctttactgcttctgccgcaatcggcgttcgcaaagtaatttctaatgcttttaagccaccgttataaagcgcacgtgcaaggggtgctgcatcttcaagtttttcgataacaacaaccggtaccacaggtgccgatgataaaattttctcaatgctcattgtatgttcctcatagcccagtaacggcgtattattattctaaaccgaaggcgctagcgccaaggtctgcactacttactatatttctgaaacctgcgaataattctcggcctgtaccatatgtttggcttggttggctaagttgtaattcacgttttgctaattcttcatcgcttacgtgtacttttaatacacccgctggtgcatcaagtgtcactaaatcaccttcgtgaatttttgcgattacaccaccttcaacagcttcaggtgctaagtggattgctgcaggaactttacctgatgcgcccgacatacgaccgtctgtcacaatcgctactttgtagccttgatcttggagtgttgccattactggcgttaatttatgaagctcaggcatgcctttcgcttttggaccttgctctttaattacagcaataaagtcggtgtttaattcaccacggctatacgcttcttgtaactcgccttgtgagctaaatactttagctggcgcagaaacaacctgatgtgactcagccactgcagatactttaataacggctttaccaaggttacctgtaagaagctgtaaaccaccctgcttgctaaacggattatcaatcggacgcaatacttcttcatcgtgtgacttttcaggacacgctacccatttaactttgcttgggcctgtgctgttagtcatgatcactgatgaatctttatctaacattggctctgtggtgtaagcttcaaggccatcaccaacaatcgttttcacgtcgttgtgtaggtaacctttgcttagtagttgcttcattaggaagcccataccaccagcagcttggaagtggttcacatctgctgaaccattcgggtagatgcgcgtaaggagtggcacaacttcagataagtcagccatgtctttccacgtaaggatcacacccgctgctttagcgattgctactaggtggattgcgtggtttgttgaaccgcctgttgataacaagccgactaaaccattaataattgttttttcactcactacgtctgcaaggcagttagcatcttttgtttcgattaactgctttaacatggtttctacagcatgacctgttaaaccatcacgtagttctgtgtatgggttaatgaaagagctaccaggtaaatgtaggcccatgatttccattaacatttgattcgagtttgcagtaccgtagaaagtacaagtaccggcactgtgatacgacgcactttctgcttctaacagctcttcgcgacttactaggccttgtgcaaatttttgacgtacgcgggctttttctttattcgggatacccgattgcattggacctgctggtaagaaatacgttggtaaatgaccaaatgataaggcaccaattaaaagtccagggacaatcttgtcacatacacctaaacagaaaacaccgtcaaacacgtcgtgcgataaagaaaccgcagtcgacattgcaatcacatcacgtgaaaataatgacagttccataccatcacggccttgtgttacaccgtcacacattgcaggtacaccaccagcaacttgtgctgttgcatcgtacttggttgcaaggcttttaatgatttctggataatctttgtaaggtacatgcgctgaaagcatgtcgttataagcgttgatgatagctaggtttggttgctcgtcagcttttaaacgagctttgtcatcgctgctacaagcagccataacgtgtgcaatattaccacagcctaaacctgcacgaactcttgtttgtttttttgcgtgcgcgattcgctctaaataagcttggcgggtctctttactacgttcaataacgcggtcggtgacttcttggatacgaggatgcaacataaaattcgactcatctctatagttagaggataaaggctcagtaacaattacagactccacgaatataactgtactgagcatctttgatttacccgttcaaaggtacgctatcaggctgtctctcacaaccaacctgacaccggtgtcactgtattaactcatgactgtgacaccggtgtcaaccctatctgttaaatttagtttaatttttttaaatgaccaaataatgaacaatttaattttagtagaatatgaggatgtttcatgtttatatctacttataacgacttagataaagcttgcacattgccaaacttattacttataaacagtaacttaaattaaaattcactcttttctagcttcaaaataaaaaagcccgagaacgcgtcactcattctcgggctactgtgaaaaaatatgatgaaatttatttaattgctgctgttgattcacgagtaattagctttgcttcaagtgtcacttgataaggtgactcttgtggttcactaatatgtgtaattaattgcttgactgcttgttgtgtcatttcttcaactggctgtgcgatggtggttaagcctggccaaatatgacgggcaataggtgcgttatcaaaacctgcaatagaaatatcgtctggcactttcaattgcatttgcgtagctaactttaataccgctgctgccatgtagtcattagaagcaaataccgctgttggacgagggttcaaatctaaaatagtacgggcactatcaacaccagagtgataactaaagttaccttcttcgactaaacgctcatcaaattcaatgccgtttgaggcaagtgcacggcggtagcctttaaaacgttgttctgtagcactatgatctgggtgacctttaataaacgcaatttctttgtgaccaagcttaattagatgctcagttatttcaaaagcgccctgctcatcattacttcgtacagaaatagaatcatcttcaagggtggctgaggctacacgagcatacgggatctttttcgactttaaaaaactcactaattgaggaaagtccgaaaaaggtggagttaaaacgataccatctaaacgagaggtttgaattaactgctcaatgttactaattaactcttcaccacgtaactcacaaggatgaatcaataagttgtaattaagttcatgacacgccgctaaagcacctgtttgcacgcgggtaatgtaacttttacttgggttgtcgtataagcaaccaattatgaaactgcgattttgtgctaaaccacgggcaataggattaggcgtgtaatctaactctttaaatacttttagtaccttttcgcgcgttgcatcactcacgtttggctcattattcagcacgcgagagactgttttcttagaaacaccagcatggctggcaacactgttgatggtaacttttttcatccgctcttaatccaactgcaaattacgcgttactgtttacatgtaaacacgcagcagcaccaatgaatggaatgttgtcttgtgttactagtgtaacagggatctgtgaagtatattgcgacataatacctttgtctgcaaaacgctcaataaatcgactcgataatagacgttgttgcatgcgtggtaaaataccaccaccaataaatacaccacctaatgcaccaaatgtaagtgctaaatcgccggctacgctgccaatccaatcacaaaactgatttaatgtcgcatcacacacttcgcattggcctgtagtagctaattcactaatttgcgctgcatctaaatttttagcttcaacaccttttaccgcagccatagcacgatacaaatgcgcaataccagggcctgagaacactgtctctactgacacatgatttaattgttttttaagctcagtgattaaaaggcggtctaactctgttactgcggcaagggtaatatgacccgcttcgcagctaagtactgcgctgccttgagaggtacgcactaagcacgctgcaccaaaaccagtgcctgggcccattactgcaatatttgcattttcatctgcttgacctgccttaacggccatattttgcgaatcgtctaaatatggtgctgcataagcaaatgcggcaaagtcgttgataacttcaagttgctcaaatgaaaactcagcttttaaatctgcaacgttaaagtgccagccaaggtttgttaagtgaacttggcctgcttttatagggcccgctaccgctaaacatgcacgtttaggctttggaaacgatatttgactgaaatactgattaattgcactttctaaagaaccaaaatcagcacttgggaatgttaaattatgctttataacaaactgatttgtttgcgtattaaagtctgtgattaaagcgaaacgagcgttagtgccgccgatatcggcaacaagaataggagcgaattctgtagttgtctgtgtgttcatgttgttttctctatttgtctaagctattgccgcttatttttctagttttcaatggcaaagccactgtgtctgctaaactttgggtcgttgcctcaaagaagctatcttttgtattaaaaaaatgctgcccaaatgaatgggcagccaaatacgttttgacaacaaaatgataaaacagtgacattatgacaccggtgtcagattcgaatcaataaaaattttcattatttgtgaatgcatacgtattttattaaaaaactcacaccttaagtgctaaaaatcaacaaaatgcacagaaataacacctattagctctgagttttgcttgtaattaaccactcgtcacaaatagcttgaaaaaaatattaaatagccgaaaatggcaattactacttatgttatttggtaacaatatgaaaggtaaggcgacatcttttgacattgcacattatgcgggtgtgtcacagtcaaccgtgtctcgcgcattaagaaacagccctttggtcaacgaagaaacgcgtagacgtgttcatgaggtagcaaaacagctcaactataaagttgataaaaatgccagtaacctaagaacacaacaaagtagcaccctcgcccttttgttatttgaagatccaacctcagatgaatcacaaataaaccctttctttttggctatgcttggtagtattaccagagcgtgtgcgaaagaaggctatgacttgcttgtttcgtttcaatcaagcagctcagattggcaagctgattatgaagatagtcaccgtgccgatggcttaatcttattgggttatggggattacctcgattatcaacccaaatttaaaaccttaattgaccaacacactaagtttgtctgctggggggcaagcgtcgataaccgccctgacttaacagtgagctgtgataattatggtggtggtaagttagcggcagagcatttattagcaacaggtagaacagattgtgcttttattggtgatgcctctgagcatagccctgaattttttgctcgctaccaaggttttaaagatgctttcttagccaaaggcgtggctttaaacgaacgtaagatggctaatgccatttctacagaagaatcaggctatcatgctactcgatcattgattgccaataatattcgttttaactctttatttgcagccagtgaccttattgctattggtgctattcgcgccctaaaagaagcaaaaataaaagttcctgacgatgttcacgttgtcggttttgataacattgctgttgccagctttgttaatccgcctcttaccactgttcagcaagacaccactcttgcggggcaaatgttagttgataatctacttaagcttattcgtggtgaacaagtagaaaatacgcttttaccgcctcgtttaattattcgcggttcgagtgtttaacccttagcgataactccacagttatcgctatcagctctacaaactaggcttttatttattaaaatcgcttttttttcgatttacccaagactattacttcgaaaaagcagataattacacctattatgatgaaaatgcttatctagctgtataaagcttcagatagcaatgcgcacaaaggtggaattttttaatggaaattaaagttaattttctcgacaacctcagacttgaagccaagtttgatgatttctctgtcattgcagaccaacctattcgctataagggtgatggcactgcgccaagtccattcgattatttcttagcgtcttctgcattgtgtgcggcttactttattaaagtgtattgtaattcacgcgatatcccgactgatggtattcgtgtggcgcaaaacaatatcgttgacccagaagaccgctataaccaaattttccaaattcaggttgaattacctgaaagcttatctgaaaaagaccgcacgggtattttacgttctgttgaacgttgtacggtaaaacgtgttattcaaactgggccagagtttaaaatcgatactgtagaaagtatcgaagctgacgcacaagcaatgctgatggcaaaaccaggtgatgacagcaacacgtttattttaggtaaagatttaccgcttgaagaaaccatcgcaaatatgacggccatccttgaagaattagggatgaaaatcgagatctcttcttggcgtaatattgtgcctaatgtatggtctctacatattcgtgatgcagcctcgcctatgtgttttactaatggtaaaggtgcaactaaagaaagcgcgttatgctcagctttgggtgaatttattgagcgcttaaactgtaacttcttctataacgatcagttcttaggggaagacattgctaatagcgagtttgttcattatccaaatgaaaagtggtttgctctgactgacgatgactctctaccagagggcattttagatgactatacccgtgaaatttataatccagatggtgagctatgtggctcacacctaattgataccaactctggcaataaagaacgtggtatctgttctattccttatgtacgccactctgacggtgaaactgtttacttcccatcaaacctaatcgaaaacttattcttaagtaatggtatgagcgcaggtaacaactttgccgaagcaaaagtacaatgtttatctgaaatttttgaacgtgctgttaagcgtcagatcattgagcaagaaattgttttaccagacgtacctcaagaggttttaaacaaatacccagggattgttgcaggtattaatggccttgaagaacaaggctttccagttgtagtaaaagatgcctcactaggcggtcagttccctgtcatgtgcgtaacactcatgaaccctaaaactggcggtgtatttgcttcttttggtgcacacccaagctttgaagttgcgttagagcgcagcttaactgagctattacaaggcagaagcttcgaaggtttaaacgatgtgcctaagccaacatttaatagcatggctgtgtctgagccagaaaactttgtagaacactttattgactcaactggcgtgatttcatggcgtttcttcagtgctaaacacgattatgagtttgttgagtgggatttctctggcagcaatgaagaagaaacagcgagcttattcggtattttagaaagcttaggtaaagaagcttacattgctgagttctcagatcttggtactgcatgtcgtattttggtgcctgattactcagaagtgtatccagtagaagacttaatctgggacaataccaataaagcacttaatttccgcgaagatatcttaaatctgcaccgtttatcagaagatcaacttgctgatttagttgagcgcttagaacaaagtgaacttgataactacattgatatcatcaccttaatcggcattgagtttgatgaaaacacagtgtggggtcagttaacgattcttgagcttaaactacttatttacttagcacttggtgatttagaagcagcaatggagcttgttgaagctttcttacaatataacgacaatactattgtagaacgtggtctattctaccaagcaatgcacgcaacattagaagttgctcttagtgatgaccttgaaattgaagattacatccacagctttacccgtatgtttggccaagaaacaatggatgccgtggttggctcaatcaacggcgatgtgatgttttatggtctaacagagaccagcatgaagcttgagggattagatagacaccttcgtttaatcgaaagctataaaaaactacatactgctcgcgctaaaaaagccgggttataaaatccattcccccctcaaattcacactttgaggggggaagaatactatctacatttaattttttttgagtacatcattttctttagatacattaaatctctcgcagccccccgaaattcttttaataatgacatactatatttaatttcaaatgtagactcggggataaaggcatagtttatgctggatagatttttactttctattgcccttctcaattcttcattatttactttttcgtcaccaaataacgacctgatgataacattttcttttggtacagaatcacgtactttttgtaggttaaatctttttttatgactttttattttttcattcagttttattgagctagtatttttatcttggaatgaaattttcaatactcttcggtaattattatttttattcgggctagctctgtgaaatgcagttctattaaataaaaaagaatgtcctcttttacctgttatactgtaaaattttgagctcttaaacaatctaggaagataacctaacttttttgtgcaaacttcaaatgcaccatcattggcacctacatcagttagatatacaaaaaggcttatatgctgaatacctcccttttcaaaatcatgaatacagtctatgtctctatgccaaccgtctaaaaagttgtcccctgctatatgtgatttttgagacttaccatcaatttcatatgaatgacaatgataaagaattggattgggcattagcttataaattaatgatattaagcttgggttaaaaacatcgtaaagaacccctaaattaagcatatctaaagcatctacatagcgtctagattgattctgctgtaagaataattgatcaaatttagtattcaaatactctatggtttcatctgaatagattggttcaattgcgacaaaagaatctttagtaagcttttcagctaatgttgatttaactgtaaacttactaagcatatctatacattccaaaaatcaaacagacaagaaatatagaaccataaatagtaataaattcactcaacgaatatatgcctattaatgatgttattaatgttaatactaaggctattacaccaaagctctctttgatacgttttttcataattcccttcacttatcgaattgttccttttttgcacttaaaaagattgaaactgacaattttacttgaagctttttataaaactgctcagcataagttataggtacaaaataccttaaattattataaaaacaaaatttattccatattcttaatacaaagagctataaactttaacaaataacgaacaatgcacgctgttatagcaaaaacacgaggttataaaatgcaagacgatagcaattgcttatggcttaattctgatacaggaaaaactatttgctaagatttggttcaaatcgatagtgacctgtaattatagttaaataacatatcttccattttcggcccccagccaatgttatgaacaatgagaggtcttaatttatcttcagatagctcatctgtaacaatgccgatatgaggcctattattaggtaaaacccaagtcacaatatcaccagcttggtaatcagcagctgttttgctaataacttttcttgtgccaaatttttcaaaaaacacttgcaggttaggtacccttcggtggtcaatgttggtatctggtttggtcaagccccaaattcgctttgaaggatataaggtaaagttgtcgcgcatatcttcatgtacaagcgtctgtaaatcaattcctaaagctctatagctgcgaattatcacatcggtacacacacctatattttttggtacatcgccattggggtagtcaatttttcgataactgccgttataaactacaacgtgttcagtacgctctttcgcagctttgactaattttgcttgaaagctttgtgcttgcgtatcaaacgcaatcaatgaaaataaaattaaggctgtttttatcatttacaaactccatttggaaaaataatacagtacttcataggctacaaaatgctacacgatttcaatattgcagtttccagcttttccctcaagtaaaaaattctaacgcactgttttaaaatatataaatgaataactcaagctaaatacatacaacgatgttatttcaggtttttaccttgatattgtttttataactagtcattgataaattaataattaattaaaacatgacaagtttataaatggactttatacgtttttttatcaccttatgtgctttatttattgcttcattcagccattcagtttcagctaaattgctgataggtgtatcaagtgaaaatggcgaatctttaaagtactaccgtaaacaatttcatggtgaattaaagtcagcatatagctgtgttattaatcatctcgaatccgactttgacgttattacagtaccgcaagctcgtttaattaaaatgttaaaaaataatgaagtagatatcgctatgccattattactgcttcctcaaagagatctatttgcgactcgttcaaaaacaatttatcaagttggttaccagctcataatccaggcaaatgaaacagatttaagtattaaaaatttacgcaagcaggcattattacaaggcatagcatataagcgcggtactggtgcgcgcaccttaatacttaaatatttagacattgatgaaaatgaaatactaagccatgagcaacaagttaatacatggcaacaagctgttgagtttgtagctaaaaacagagctggtattacagccctaccgactgtaattgcaaaagatatcgagcctcaccactttgatggcgttacacgcataaaaatgccagaccaccaattaggcctctatatgtcaacacgttttgccaaaagcgctgaagcaactataatcaatgatgcatctaaaacctgtaaagaacttagatagacgattaattagttatttttctcagtattaagttcggctaaacggccttcaacttgcatccgctcttgctctgttagttcgccatagaacttaggatatggccagccataaccccagcgaaagctggttggtaaaaaaggtgtaccacccactctgacaccagcaagcatcaataccgcaatctctttctcacctacttttgcaacacactcttttaaatcgacatcagcttgctcacgttgcttgaaaataccgccttgccaatatgcgagatcatgggctgtacagcaagccaaccacaagtttttatgttctatagttccatcaggaaaagagctgcaaccatcactgctgaagggttttaattttgcattagcaacacttaagaaagggtaagtaagtagcattagaaaaacaaagcgaagcatgtgtttcattgttttagagctcacagttaattttcaatattatacacagagccttcacaacgcattgatttatagcactgatatgtatttgacgtagtataacattgagaaaaaactataccattaccacccattttatgtgctttaacttttaaagaatcttgtaaagtaccttttatattggaaggattgtaataataagcatcttcagggataagagagtcatttttttcgtgacaaaagttggattctacattacctaaatagattgatctaaaattgaaaatttctcgatcgttataaatctggacttgttcacctcttcctctgttttcggcgtcagcaataatataattcccgaagttagaattaatagagcaagaacattgtaaaatcagtaataatataagtgaaattctttttagcatattaattaaattccctttactttttaatttaaacaaagctactcaaccttagcaaaacctctatttttaaaaaagtgcaatttttgcttttacttaaataggtgtttgtctcagaaattatatttacataatgctaaaatatcacactatttaaaaattaatgtaaaaaagtgcaaaacaaaaaaaaccgccaagtgttaatcggcggtttcatcttctgaagctgaattatttcaatgcgtcttcaacaactgggtaatggtcccacacatgtttatcgctcactgaacgaagtaacttgatatattcagcgtgagtccaagcaagtggtgtcgctgagtttgtcccctcacctaactgatagcctgctttattattaccaacgccatcccaaacttgctcaggtaacatcatgccttcattagcaaatgcttccatgccttttacataggtgtctttaatcgcttgttgcttcatcgcatcaaggctattggttgcgtttgccgcagcgatttcatagtgaccacgctcaccggtgaaaaacggccaaacacgaccacgttgacctggagtgttattgccaccttcagcatagttgttacctgtcacttcatcttcaccgtaaccatcgttaccatagcgacggtagccagggaatgaacccgaaccatcagcaaagttaaaggtgtagcgcacttgcaggttatcaactaaggtttcgtcatcatactctggtaaagtttttacaatgcttggagcaagtgcatcacgcacaccatagcgaacaagctctaagaaaccgccatcaaggatttgctttttatcaaagcctttacgaccgttattagcattaagtgtggttgatgagtttggatctttgtcttgaccgatacggatgaaatattcaccatcactgttttcagacttaaggttaccttgagtcgtaaacatcgtgctttcaatttcactgttgtaggttttagccgttgctagataacgctctgcatttttagtgtcatctgcttttttagcaatatcagcagccgttactaggcctgcaactaccgcagctgttgttgagggagaaaaaccattttgttcttcccagcgctcttgttgcgttgctggtggtgtaatttgtgtgtcgttccatagaattttcgcaacgccaccatcaactaagaaatcagccgctggttttaacattttgccataccaatctgtcagctcttgatcgcttagtacgccagcttggtgtagtttccacgctaacataatcggcattgctgtttgatcaagctgaacagctacccattcaagctcaccatcaacgtgcgttttttgtaagaaccaacccgtgtcaccaccattgcctggcgtgctgtccgtcacttgtactttttctagatattcaaacgccgttttagctgtacgtgtatcacccatagccataaatgccatagcaacttgatagaaatcacgaacccaaacggctttataaccagtagaacctgttttagccgaaaccgtttcaccccaagggttagaaagtgacgcaattaaagcacctgcatgagttttatcttcttgcgcttttaataccatggcgctggtatatagcaatttaccattatcagcagtgctgttagttaatgtgctcaaaggttcaaggcttgctaagtagtcttgccaaccaattgccgcaccttcgccgttataagcagcaagcactttttcataaccttggtttaaacttgtttggccttcttttaagcttgcagcttcagaattaccaaagcttaaagctaaatcaaaggtggtgtgtttagatacttcgccaagctctgcaagtaagcttacattacccgacttatcaccggtattttggtaagtcgttgataatgattgcgatgcttttaactcttttaagccatcactcacacctgtaaagccaacacttgcctttttaaatggttgagcggcttgtaaagataaaaagttatcatcttgccaagcaactagacctttgtcggtcacttttgcgaaatcgtctaaaccgttgttatcaatgtaaggatttacattaacgtaggctttcacaccttcaaggtcagtattaaacacgctacgaacaaacaatgtttgcccgttaggatctgtaaagatgtgtttttctagggtgaaacggccttgtttatctttacttaccactttgtacgcaagcgataatgggcgacccgcgtcgtctttatataaataatcaatgctaacatccagatcatcgttttctgttacggtaaagtctttaccaactacaacaaactgcatatctttgatttgtgcttggtgaattaaaccaaacatggtttctgtgatcatgcctttagcgattgaaaaccaaacttttgatactttccctgtagcagctgcatcgctatagtggccgtcttggtattgctcgtaagatgtaccaatacctgttttacctgagtatgcccaaaaaggttcaacacccggagctcctggcgcagacacctgctcaactgatgtattaactgattgctctgaactacaagctgttaaacctaacgctaaaaaacttgcggtaataagattaaattttttcatggtgtgtccttattattgttgcttaacgcgcagtacagcgaccgctgctagtacaaatgacactgcacctagcactaacgcataaatcggttgattatcaaaaaagtgacgtaaaattaggcctaatacgcttgccgctaaaagctgcggaataacaataaagaagttaaagatacccatatacacacccattttcttacttggtactgaggtacttaacattgcgtatggtaaagatagaattgacgcccaagcaaaccctaccccaatcattggccagattagtaaacttggatctttgataataataaagctgaccaagcccaatgcacctaacactaggttgatagcgtgagccatttttagccctacttttttaacgataattggaatacacagtgctgcaatagctgcaaaaccgttataagcggcaaataatacaccaacccagtcagcaccgttgttgtaagcaagagagcttgtatcactgctgccgtagtggaagctagttactgccgaggtggtataaatccacattgcaaacaatgagaaccagctaaaaaattgtacccaagccaattgtttcatcgtttctggcatagtgaatacatcattcacaacttgataaaagccaccactggttgcgtttttagcttttaaagcaccggcaataaattgaataacaccaaagctaatcaaaccacctgcaagcaaatacagctctttctcaagagaaagaccggtaacgataccaagtacaacaaggccaagcaccgtaaagattgcagcgcctttgttaaagttgacatcactttgaacatcagccgagtcatcgctttgctcttgttcatgaaagctttcaagctcttctggtgaatattctttagttgtaaagacggtccaaaatacagcaaaaattaaaacaacggcaccaaaataaaacgagaattttacagaatccgggatttgcccagcaggtgctgtattagcaatatcgaaccagttagtcatcatccaaggtaatgcagacgcgacaaccgcaccgataccaatgaagaagctttgcattgcataaccagttgcacgttgttttttcggcagattatcactgacaagtgcacggaaaggttccatagtcacgttaattgacgcatccatgatccataacatacccgccgcaatccacaggcttggtgagttaggcataatgaataacgataacgtcgttaaaattgccccatagaaaaagaacggacgacggcgacctaacttattccatgttttatcgctccagtaaccaatgataggttgtacgataagacctgtaagcggcgctgcaacccaaaggattggaatgtcatcaacattggcacctaaagtttgaaatatacgactcacattaccgttttgtaatgcaaagccaaattggatgccaaggaatccaaaacacatattccatatttgccaaaagcttagcgttggtttgttattattcatagtcagcctttaaggtaaatactgcactgcttaagccgttcagttgtaattgaattggcgccttcgttgctgcctcagaaatcacaatgtcggcatgattttctagattgtcagttaacgttaaaccactgtggttaagtttaggtaataacgcttggttaagagtaagctcaacattctgtggattttctgaaaagttacttactacaagcaccagctgttggcctagcttacgcgtaaaggcaattacttgctctgagccagtcaattcaaccgcttgcatgtcaccgccaacaattgcaggaagtgtgtttaatgacattaacttcgtgtagtaagcgcgaagatcagcttgctgctttgaaagcgcaccgccatcgaatttaccattattcatccatgcttgatgcgcaggtacacccatataatcgaaaatgctggtacgcgttgggtcaccaaaaccaccgtcttcagagccatcttcaccaacagcttgaccaaaataaagtaaggttggcgaacgcgacattaatgtagaaaccaccatagctggcttacctttttcactgctaccagcgaaatccgggctagcaatgcgttgctcatcatggttttctaaaaagtgcagcatgtgctcttcaatatcagccacttggctttggatttcaaaaatagtttctgctggttgtttaccttgcatcacagctttaactgtgtcgtaaaagccgactttgtcgtacagataatccatcttaccctgctgaatataagggcgataaagtgttgggttataaacctctgccagaataaaggcatcacttttttgcattttgattgatgagtttaaaaagctccaaaactcaacaggcaccatttctgccatgtcataacggaaaccatcaacacctttatctaaccaatatagtgcgatatcgcggaatttataccagctatttggtaggtctttatcctgccaaaaagcatagtgcgcacggtaatctttttcagcgtaatcagctggtagtgttgggaaatcgtagctgccgtctggtttcacaccgtaattgattttaactgtttcgtaccaatcattgatgtcgggtttagcagcgcgtgccccattgcccgtccattttgctggtgtttcatcaaactgattatctgcaagtggatgcgggttaccacctaatacttggtagctatcgcttgttggcacttgaaatgactgccctgttacataataaaaattattatcgcgagcataggttttcgtcgtgtcatcatcagcgccgaaatctttaacaccttcaggcttggcaaccgactcgtagttacgcgctacatgatttggcacaatatcaataacaactttcataccgtgctcatgagtacgattgataagctcaacaaactcttctaggcggcgctcagggttaattgctaaatcaggattaacatcgtaataatctttcaccgcataaggcgagcctgcacgcccttttacaacatcagggtcatcttgagacaaaccgtattcagtataatcagttactaatgcatgacgcggcacaccggtataccaaacatgtgtcgtgcctagctctttaataccttgtaatgctgcatcattaaaatcagcgaatttgcctaccccattttcttctaatgtgccccacggtttattcgtggtgtttgtattaccaaataatcgagtgaatacttgataaaccacaggcttagagatagctgcttggctagcttctgattgttgcttttgcgtgttctgctgtactggcgcatcgttaccacaggcagttaaacctaaaaccgaagccactactagcgcagttagtttgtatgttgtcatcattacttcatttttctgtaaatatcagttcatactaatgttaagggctgcatacggacagtaaatgcatacgtattcagcttattagttgcaattattcaagctcgattaagcgtgcttgcatagcttttaagcggattggcgctgcaagatcaacaggtttttcggtgattaaatcgcgtcctttattgttgcctttcagcacttcttgcatgtagcttaagtcccaatcaatggcttgttggtttttgttaagaatagctaatacagtttgcccatggtgttctctcagatagctataaacgccttgcttcggtgaaaaatgcattaaacggccttcgcttagggctggtttttcttggcgcagtcgaagcagctttttaatgctagttaacatctctttctgatcagctgaaagtccttcgcctgtgaaggcattcgctttttgaccatgaaacccacccgggaagtcaatgcgaatatcaccgtggtcattacttggcgtgttatcaagtaacagttctgtgccgtaataaatttgtggaataccgcgagtcgttaacagtagcgtcatggctaattttgtttttgctaggtcttgaccaagctcagtgtaaacacggctcatgtcatgattatcagcaaacactaaaatgttatctgtatcagcatataaaaagtcattcgctagcgattgatacacttttacccaacctgtattccagctttcttcttcgttgagtgcttggatcagcgcttcttgtaatgaaaagtccatcacactcggtaagtcagaggtataaccatcttgatttactttgccgcgctgccaataagaagcaattgccgggttggttgtccactcttcacctacaatattaaagttcggatactcggtcataatggctttagtccaatcggctaaaaatgctttatctgagtatgaataggtatcaacacgaatgccgcttaagttggcgtattcaatccaccaaatggcattttgaatcaaataagtagacagtaacggctgacgctgatttaaatcaggcatggactcaacaaaccaaccatcattaaattgacgtttatcgtattggctcgcatgtgggtcttgaattgtttgtctggcgtgactagtggcatttttaccgttttcaaacttgccatcaaagttaacccagtcagctgttggcatatcagccatccactgatgtgatgaaccaaagtggttaagtaccatgtccatcactaaaccgataccatgatctttcgcttctgccgacaaggttttataaagcgcattactgcccatacgcggatcaactttgtaaaagtcagtaatggcataaccatgataagagtaacttggcatgtcattttcaagcaccggtgttaaccaaagttgcgtcacacctaagtcctcaagataatctaggctattaataacaccttgaatatcaccgccatgtcggccacctttaaagcttgggtttgcagcctccttcataccagcaacggtgtcattgcttggatcaccatttacaaagcgatcagggttgattaaataaagcgtatctttatttgtaaagccatgacgattggcactttgtttatcacgggcatttaacgggtaagtaaattctgtgccatcttcagctttaaaggttagtgttcctgcctttgcattatcgctaatggttaaatctaaaaacgcgtagttagggttattcgttgttgtcacccctttaaactcaacacctttataaggcatcatttgccacgttttgctagcaatattgttatcgtaaagcatgacttgtaacgagtcattttgcattcctacccaccagttttctggtgacgcagtaattgcaaagctggctgtcgagttgaaaagcgtaaatgcggtcgttaacgctaaaaatgttcgtgttgttttcatagttaattttgtactttttctaagaattgactgtggcttggcagttgctctacagtgctattaatcagggtttttaaattactaaatagctcatttaactgctcatccgataacgcattagttaatggatggtgatcctctgctataagcccttgccctatcatcacttgttgccatgcaacttcggcaaatagctcatcgtcttctcttacgagcttgccactggttttaaatagctcaattttctttttaagactacttggaatatccatgcctttacaaaaacgccaaaacgcactgtcatcacgctcagtaatcttgtaatgaagaataataaagtcacgaattcgctcaaattctgttttactttgttgattaaattcatccacaaggctttgtttaataccttgatgcggaaaaaacttaattaaacgaatggctgcactttgaattaaatgaatactggtcgattctaatggctctaaaaatccgctcgataagccaaccgataccacatttttatgccactgctttaaacggcggcctgttttaaatttaataacgcggggctctgtcagtactttagcaggtaagttatccaagagctgttgttttgccgcttcgtctgataagaaacgagaagaatagacaaggccgttgcctacacgatgctgtaatggaatttgccactgccaacccgagtctcttgcaattgaacgtgtatatggaattgcatcgttagctgattcactttgcactgcaacagcactatcacatggtaaccaatgtgaccaatcttcaaagccagtattaagagtttgttctatcaataaagcacttaaaccggtgcaatcaataaataagtcgccgtctatttgctcgccatttttaagcaataaagaggtaatatgcccgctttggtgacattgattaaccgattcaattttgccttcaatccgttttacgccccgtgattgtgctaattcttttaagaactcgccgtatcgtgtggcatcaaaatgataggcataatgtaagcccgctaactgagtgtttggaatttgtttaaggcgggcaaatttatgtgcttttgcagcttggtagttaagtgaaaaatcccaaaaatcaggtgcattattagcttgatttgcttttaaccaaaagtggtaaaactcacaaaacgggaagtctttaccaatctcaccaaaagcgtgcatatagctgtgaccttgactgcgccaattttcaaactcaatacccagtttaatcgttgcgccagtggccttaataaattctttttcggttatagctagcgcaccatttagatgcaaaataggtggaatactggcttcgcctacaccgacagtgccaatttctgctgactctatcagggttatatcaagcactttacccagcactttattgagtaatgctgcagttatccaccctgcggtaccaccgccagcaatcactactttggttattttttttgattccatagtacacctaacgccagtttcaattcattgagtgtagctcactgatataaaaaagcccttgtaaaacaaatcacaagggcaattttatatctctgtttagctcattacagcttgtagctgaagcctaacaggaatgtacgaccgtagtcttgataatcacgaacttgaagtgagttatcaccttgtagtgatgtgaacggctcttctgtgatgttctgaacttggaaagttacagataaaccgtcaagactctctacaccgccttcactaaagtcataaccaatttgtgcatcccaaattgtttcgcctttaatatcaacttgtgtagtagcaaaacctaaaccgtatacgtcacctttaaagtcactacgtttacgcatgcttgtacgtgcttggaaaccgttacgctcaaagtaaactgttaagctatcgatttggtcagataaaccaggtagctcatattcgttaccattttggtcagttaagtcttgctcaacacctgtatggcttgcgattaaaccaaaaccgtctagagattcactgaacatagtgaacggtagtgttaatgaaagctcataaccccataggtcaccagaaccaccatttactttaccagaaccagtacctgttgaagttgcagggatttcaccggttgacgggtcagctacaccgctcatgtcgatttcataagtaccatcgaaaatccactgagtgatatctttatagaatacagcagctgcaaagtaaccttcttcatggaagtagttttcgtagcttacatcaaaacctgtagcttcttttggttcaagttcagggttaccacctgatacactccagtagttaccattttcatcaggttgttgattgtaagaagcattaactgatgagttcatttcatctaagcgagcacgagaaatcgttttcgccgcgccaaaacgtacagtttgctcttcatcaattgcaaacgataaattgatgcttggtaagaagtggctgtaatcgtggcttacatcagttggtgatacaacaactaaaccattcactgtgttagcggcaaagccttgtgaagactgttcagttttcacataacgaacaccaacgttacctgttacagggattgaaccaatttcagcattaatgtcagcttgagcaaaaaacgctgttacttcttcttgtacagtccaagattgtgtcttgtgttttgaatcagttaagctttcttgaagaaggttataataaccgtcgtttactaaaccgttggtatcgtatgcaaccatgttgcccataccaatgaagtcaaggctcgctgtacctaaacggtattgctcagggattgataacatacctggatttgataaagagaaatcttttaatgtcatgaagtaaccttcagacactttgctcttttcacggtcacggtaagacataccaaatgacacacggctgatgtaagcgttatcaagtactttgcttgcagcaagttttaatgtgcttaattcatcattgatttctggcgcgttgataaagccatcttgcgctgtattttggtattcagtacctgttaaaccatacttatcgttaagtgcagcacttgcaccccaagataatgggccaccaagttggattaagtcgtagtcgctgtaatcaaggttgtggctgaattgcgcgccagtgttaccaccgtcaaactcgtaaccaatcgtatcagcaacaccatttgcgtcaccacgacctgtacctgagtagctttcgatactccagatttgacgttcaacttcagagcggcttacgtcaaattctactgaccagtcatcactgatgtcgtattttgcattaaaaccaaactgagttagctcagcgttacgctcttcgtagtcgttacgaacaacaacacgttgaccttcagttactgcacttgtgataaaaccagagtcagcatcaattacagctgagcttgggtcgatagaaccttggccccaagcaaatggcacttcaataccacgtaagattttttcatccgaaaaatcaacgtataaggcatcgaatgtcatgttaagacggtctgtcggcgcagcttcaataacaagcatcgctgtgtcacgctcaagagtcgatgaacgtacgaatggtttagcaccacctaaaattgaatacgtgttaccgtctccaccggtaaactcagggtagccccatgaattccaacgtttttcttggttaggtgagctcattgtattgtaagcaaatgcaacaccaattgtgtcatctgcaaactgatcaatgtatgaaacagtaccgcggaaacctttatcgtcaccgtctgggtttaatttatcaaaaccagtttgctcatattggccattgaacatgataacttgctcacctttgcttaaaggtttaacagtttgcatgtcgattacgccagcaataccttctgcatcaagactagcgcttggtgttttatataccgttacgccactcataatttctgatgggtaaaggtcaaattctacgccacggttgtcaccgattgatacttgctcacggccattaaaagtagtagcactttcgttttcactgaaaccacgaacacttacgcggctagctcgaccatctagacgttgagcagttaaaccaggaaggcgtgcaattgattctgcaattgatgaatctggtagcttaccgatatcttctgctgagattgactcaacaacttcaggagtgaagcgtttagtattaatagattctacaacactgccacgaaaaccttttacttcgataacttcaacgttatcgttttttgctttttggtcttcttctgcagcatacgctacaaagctatttaaacctgcggctgttaaagccagagttaatatacttggtttgaacatagacatgatgcttttcccattacccaaattgtaatgccaacgcgatgcagatatttattatctaatagctgaagtcgttgactgattttgttgtcggaatgaatattaacgccgagattatttccttaacaaatttatgcatacgtattcagcgtagttcaaccacttaaaaattaacaatacatttacacaattaagacttaacccattgtaattgttaactttagtatgataccagcacaatttaataagaatgaaacattttcgccataattttgaaccttaactctccagtagaaacacaaaagcctcctcaacagggtgttagcaaaagaagtaatgttaataaacagaaaaagttcgacaaactggaaattggtcttaccaaattttatttgcactactttggccagaagcaactgttttatgcaccaagctggggtttattgtttttacaaataacaagcaaagccaattggtaaattttttcatagatgaaatagccaattgaactggtgcaacgacggatattttttcagtaattaaaatatgaatttagcgtgcatacgtatgcagagtttttacactatcccagccttcacgtatgcttttgacattccggcaacatctggttagttgcccaacagtttacaaacactgagtgtcacgatggagaaaaacatggctcaaaagcagtggtataaaggtgcggttatctatcaagtttatccgcgcagtttccaagacaccaatggcgatggcattggtgatatcaaaggtatcattgatcgcatcgattatattaagagcttgggtgttgatgctatttggatttcacctttctttaaatcaccaatgaaagattttggttatgacataagtgattatcgtgatatcgaccctatttttggtaaccttgctgattttgatgatttaattgcacaagctcaccaacgtgatattaaaattattattgatcaggtattgagccatacctcagatcaacatcagtggttcctcgatagtcgtgaagataaaaccaacgataaagctgactggtacgtttgggcagatgcgaagccggatggcacacaaccaaataactggttatctatatttggtggtccagcatggcaatgggaaccgcgtcgtggtcaatattacttgcataacttctttgcagaacagcctgatttaaacttccataatcctgaagttcgcaaagccgtattagataatgtggagttttggcttaaaaaaggtgttgatggtttccgcttagatgcgatcaatttctgttatcacgatgcacaattacgtgacaatcctgctaagccgcctgaaaagcgtcagggtcgtggctttagcgaagataacccgtatgcgttccagtatcactactacaataatacgcaaccagaaaacttaagctttatgcaggacattcgtgccctattaaataaataccctggcacggttgctttaggtgaaatctcatcagaagactcattagctactatggctgagtacacatcaggtggtgataaactccacatgggttatagctttgaattacttactaatgattacagtgcagaatatattcgtaataccgtgagtacattagaagagcgtatgactgaaggctggccatgttgggcatttagtaaccacgatgttgaacgtgttgctagtcgctggagtaaagataacacgatcaatccgcagcaatgtaaaatgctgaccgccctgcttgcttcattacgcggcagcgtatgtatgtatcaaggtgaagagcttggtttaggtgaagctgaagtcgcttttgaagacttacaagacccatacggcattactttctggccaaactttaaaggccgtgatggatgccgtactccaatgccatgggacgcaagcgatgctgaacaggcgggcttctcaacagctaaaccatggctacctgtgggcaatgctcacaaagccgttgctgttaatgcgcaagatcaagacaaaaattcgattttgaatgcctaccgtgaatttatggcatggcgtaaagataaaaatgttctgttagaaggcgacattgagtttttaaacactcaagagcctgtacttgctttttatagaacctttgaaggcgtcaaaatgctgtgtgcattcaacctaggcgcacaaagtagcgagttaacaatctctgatacagtgtcttcactgcatacggagctatcgcatcacacagctgagttaaacaataatacagttactctgcccgggttcggttgcttttatgcaaccctgaattaattatcagttgttaaacaccaagccctgcaatgcagggcttttttattactaataacacgattagtgattcatggttttactattaatgtagtcagtaagtgcaaataacactcccgacaccacaaacgtcacatgaattaacaccttccaaagtaactcatccgttgaatggttgtttgagctgataaatacctttaaaagctctacagcagagatagcgacaatggcgcttattaatttcatcttaagccctgaaaaaccaacctttcccatccatacaggtctgtcttcgtgattgtctatattcaactttgaaacaaagttttcgtaaccactaaaaataatgataagcaaaagcccagctaaaagcgcggtatcaaccaaagttaatattcccaccaataactcttgattagttgccgaaaacgtatttaaggccatgctgtaaagatatttgaaaaactttaacaacaataagactacagcgactaataaacctataaaaaatggcgctaacagccatcgagaacgaaaaataaatttttcgacgactctctctaatgtagaaggcacttttttgtttttagtttgattaatctgttctgacatttctaaaatcactctcataagtattagtttgataatacgcggtttttattagtaatttctatatttgcagcgcactactgtgactattttttgtttatctttacgataaaaatatttcgttatcttttttacagatttcgtttataaattcacttaagcaaagcggtatgccctttgcgcacctttactgagcactttaagccagtaattattaattatgttgattaggaataattaaatgaacaaagcattgctagcactaattttggcacctgtattaagcgtgtcagcgtctaacgcaatcgctaacgaagcacctgaagcatcagctgaaatgatcaaagaatacactgagatgtgtttaaactgggctaaagatgatgacatcagcaacgaagaattaaagccatacgtactaaaatgtgtgaacgatgagcttgaagctgaaggctttaagaaagtaaaagacgtacaaatttaatttgtcgttaaaccagatataaaaaaaccggaatgacacaaagacgtgcgctccggttttttattgtcttgaaaagctaaggaattattccttagcttttgtcgatgttttcttttttgcaggcgctttctttttactttcttcaacccacttgccattttggtagtgagcagtccaacctgtcgctttaccatcgacttcactcatcacatattgttctttatttttacggctataacgaacaattgcagggttgccatctgggtcttgcgtaggcgcatcagctaaataataaaacttctcagaaatacgatctctaaaacgttttaactcttcaactttaggtgcacgagtttcacgagacttaggaaaagtattcgccgccaagaaaatacctgaagcaccatcacgaagtacaaagtaagcttctgatttttcacattctagttctggtaaatgaaccggatcttctttcggtggcgcagcttcaccatttttgagtaatttacgcgtattcttacactcttcattactacagccaaaatacttgccaaaacggcctgattttaactgcatatctgagccacatttatcacattcgataattgggccatcgtagcctttaattttaaaggtaccttgttcaacgatataacccttacaggctgggttattaccacagacatgcagtttacgtgtttcgtctatcaagtatgaatccattgccgtttcacagattgggcaacgcttcatttgcattagtgattctgtttcaacatcttcaacatctgcggcaatcgcttcatcaccaggcaccaaattcatggttgttgtacaacgctctttaggtggcaggttgtaacctgtacagcctaagaatacaccagttgacgcagtacgaatccccattttacggccacaggttggacaatctatgtctgtttcaaccatttgattttggcgcataccaccttgctcttcatcacctgaagcaatttcaagctgagttgaaaagtctgcgtaaaacttgtctagtacttgtgtccaaacgcgctcaccttctgcgatatcatccagacgaccttccattttagcggtaaaatcaaagttcatcagatcttcaaagttttccactaagcggtcagtaactatctcacccattttttcagcgaagaaacggcggttttcaacgcgcacataaccacggtcctgaatcgttgagataattgatgcataagttgaagggcgaccaataccacgcttttcaagctctttaactaagcttgcttcactaaagcgcgcaggtggcttagtaaagtgttgcttaggatctaactcaacaagcgttagtacatccccctcttttactgctggtaatgattgatcttcttcattctttttacgaacagctggctgaacttttgtccaaccatcaaagcgaagtacacggccttttgcttttagctgataatcacccgcacctacggttaaagttgttaggtcatattcagcaggtaccatttgacaagctacaaattgacgccaaattaattcgtagagctttttcgcatctgcttcaacaccatctaaatgacctgataataccgcgacacttgatggacgtatcgcctcgtgcgcctcttgtgcattgcctttagagctgtaactgatcggtgcttttggtaaatacttttcaccaaactgctcggttacgtaatcacggcacatttcaaccgcatcttttgataagttggttgagtcggtacgcatataagtaatgtggcccgcttcatataagcgttgagccagcatcatagtctttttaacaccatagcctaaacgtgtactagcagcctgttgcatggttgaggtaatgaatggtgcactaggcttactcttgcttggcttttcttcaacgctaacaaccttgtactgagctttctctaggtcagtaaccgcagccattgcctgcgcctcattaacaggcttaaatgctttgtcagcgtgttttgtaacttctaaacgtaatgcagcttcactatttttaacatcagcgtgtacatcccaaaactcttcagggataaatgctttgatttcacgctcacgctcaacgagtaaacgcacagcaacagattgcacacgaccggctgataaaccacgagcaactttagcccaaagtaatggtgacaccataaagcccactacacggtcaagaaaacgacgcgcttgttgtgcgtaaaccatatcagtgtttagttcacccggtgtttcgaatgcttgttgaattgcatttttagtaatttcgttaaaaacaactcgcttatacttttcaggctcgccaccaataatctgttcgaggtgccatgcaattgcttccccttctctatccaaatcggttgcgagatagattttatcggcattttcagcaagcttttttaattcttgaacaactttttctttgcctggcagtatttcgtaatgtggttcccaacctttttcagggtctatccccatgcgggcaacaagattcttataatctcgttgctttttataggcagctttttcttctggtgacattttgcgaacttcagcaggcgttttggtcgccgctgttttcgttttgcctgaacctgaagttggaagatcacgcacatgcccaacactggacttgacgataaaatcctttcctaagtatttgttaattgtttttgcctttgccggagactctacaattactagtgatttgcccatagttgcctatttctgaccgaaagttttaaagttttttgcccttataaatgtatatccatcacattaaacaaataaatatgattttttaacattggagcacgaatatttataggtatatctacaaacaccaattgttacaagcttttaatcgaaacttttcttcattgactgaataattaaacaatttttgttgctaatttagtcaatgtggtgttttgcggtaatttcaaggggaatatatagaacagcaacaaaaatgccaaccttctggttggcattttttaaatttaattgtgcttaaatttatttatcatcaagtatagcaattgatttacttactgtttttgtagtaccaaattgattctcgaaattaaatgtaatggtcagcacaccatctgcgtcttggttaccgtcaacctctcgagctatacgtacacttgaagacattgttgagtctctatttgtgcttccgataatatcttgatgttgcagtatagaaaaatcaccattgtctgcagtaattgttacctctgtaccagcaggaagcggattgccaaattcatcactgtagaaaatttggatattgatacccgttaaacctatatcaatatcttctgggcctgaatcaggatcatcctcatcgtaattcgggttagggcgtgtaacactcgacaaatcaatcgattcaacatcacaccagcttgcattatctgattcttcaaagccacctgcaaatgtcgaactacaatcagctggcacaactacttcgtaaggagcagtcactacttcatttgattttaatactgcgaatcgtacataaggttcatcaccagacataactacttcaatctgcttacgaacttcaattaaatcacgcgtacattgcccagcattaaaggcagcttcactacataacaatccgttatatttaccatcagggccgtcatatacaccatcattatcaagatctcgccatgtttcattatgaccgcctcgtgaatttttctccgagcatgggtctgaatcagcatcgtaagaatctctggttgcatcgctacagttagctttgtcaaaggtattattttcattgtggtcattaaatgcttcaggtaaatcatataacgtataatattcaccaacatcaaataacccgtttcgacgagtaacgccatctgatgactcctcatcctcgtagctctcttgacctttcgctaccgcaagtatgcttgttcgtccacctcgaattacaccatttggatcatttttagcgcgaactaaggtgccaatacatggggctgcaataccaaaataagggtcgcagtttacttcaccagttttagggtttattccttcagtagttgcagtattaccatcaatttcaccaattctattaccccatttgtagtcatagaaaggtcgttcaccctgagagcgccatgtaacaacacatgatgcatcagtagtacgacatactgcttcattactttgtgaacctataacacctgactcagttaaaacggttgattcaacaccatcactattgaattgattaaattggtcaccaaaataaactgtcaggttattagtgacgccattataatttaatgcatttggatttaagacttctgggcttaagtcaaaactgttttgatctgtaacaccagagtataaagcaagttgagatgacactgcgttaatttgctcagttaaaggtactaagtgaagtgtccctgctgggcaaatttcattgcttggttcagcttcgcatagttcaacttcatctgtccaacaagataaatcatcaccttcaggcaaggcagcaacatcttctttagaaacaaaacatgctttaacgacaagtggcccaggaacgatgcctgaagtcactgttgtttgtacaacaccattgttgtctgtattagcagttttttgcgttaattttgctaaacctactgagtccgtcaatttaaaatcaatacgttgctgtgcagaaacaataccatccgcatcaagtaatctgaaacgaacgactgattgtgttggtaaaccaccttcaccaggtggaagcgcaatcactggctccgaaacatcaagaaattgtattgattgaacagccgatacttcaacaggtataacagtagacgccgtaaaatttttgccgcccgtttcaactgtaatattaaccacatcattgattgaacagccgttagcacggtatgttgagcttgcaatacctgctgacgattgtactgatgcatcaattgtcgagtcattatttgaaacacacgtagagttaaattctacttctgtaggcgtggtaaataaattaccttgctcgtcgcgaagggtaacttcaataatagtactaccacccgctttcaaaggaattgtattgccttcactatctgtgtttagtccattatcaacttctaacactagatcagcgataccaacagcaaagttaagatctgcactttcacctaacgatgacaccgaaatagtaccagcaccgcctgtatttcctggctgtaattttaaaagtgcaacaccaaagttatcagtcagagctcgacctgaagaaggtaatacagaaccaagatcagttgttacatcaaccaatgagttagcaacaccatcaccgccttggtcatttattacttctacaaataaatcacctaactcggttgatgaaattgaattagtaatagtacagccagaagcttgcgaagttggatcaagcttcacattatttcgattttgatcccacgaagggttgcagcctgttagcattagaacagacactgagtattgggcagcatcagaagaagcatcatcaccatttgatataaaacctaccgttttcgtaatggtgttatcattttcatctgtatatgttgcgataacttgaccagcgccttttgaatcgccactacttaaagtgacatttgcttggccattttcatctgttagcgcagtacctagtacgggtgtaattttacctgtgaagtttgtagtaaacgaaatcaattggccagcaattggagtgctttcatcaagtaaagtagctgtaaccgttcctttgttgtttttactaaccgggttgtctgaagagaaaggtaaaccagaactgtcaacaatcgaaagccctaatgaaactgtgccactgctatcacccgtttgtgaaccatcggatgtgaaaccaaaagtatcactaaaagtctcttcaccaactatgtaggatgcagtaatgataccagctcctgccgtatcacctgcagtgacagtaattgatgcaacaccatttgaatcggtcaagctcgtaccagaagcaggtgttatcaagccaatactaccatcaagactaaaagttatcacttcaccagatacagcaaccccctgattggtcagagttgctgaaatagttaatggtgattcgaccgttacagaactcgactcttcatttgtgcccgctgtataacctttcacagatacagagtaacttggggtatcagtcgtaccaccatcccctccatcaagtgaaccgctatcgttctctaacgacccaccgccgccacaggcaactaacaatgagctgaaaactataatacttagccatcgcaataaaggcattgacctctccctagttagctattttaaatttatttatatatttacctaatattaacctaaaaattgaacgaatatcataatttttttatcaaatttacagcgaattaatttaaaatatttgtcgaattttcctgtataaaaatcttcaggctggtaggctatggcgaaatttataaaaatatagactaggtatatgtcaaaagtacgatctttaagccttacgtctcgtatcatggtaggtatggtactgggtgtgcttgttggttttatctttcaagcgattttagcgggtgaagacgatttcctaattccactaggattattctctttaccaattaaagcattttttgtggatggtatcttccatgtaggtgggcaaatattcatcgcaagtttaaagatgctggttgttccattggtttttgtatcgctggtgtgtggtacatgtagcttaagtgaccctaaaaaactaggtcgattaggtggaaaatcaatcttactctatctagtaacaacagcaatagcgatcaccgttgctataacactagcgctattagttaatcctggtgaaggtattaacctaccatcagatgcgacctacagtgctaaagaagcacctacccttgcacaagtcattattggaatgtttcctaccaacccaattgatgcaatggcaaatggcaatatgctgcaagttattgtgtttgctttgttatttggtgtggcgatggctttaagcggtaaagcaggtaaacgtgttgcaaccgtgttcgaagacttaaacaccgttattttaaaacttgttaccctactgatgaatatcgccccttacggtgtattctttttaatggctaagttattcacaactatagactttaaactcatcacaagccttgccttatactttggcgtggtggtcttcgcgctcttaattcatggctttgtaaactatagtatcttattaaaagtattaactggtttaaatccagtgacgtttttaaagaaaatgaaaaacgcctgtttgtttgcgtttagtacttcaagttcaagtgcaacaatgcctattacccttgaaactgctagcaaaaaacttggtgctcacaactcagttgcttcatttacggtacctttaggcgcaactattaacatggacggcacagcaattatgcaaggtgttgctaccgtgttcattgcacaggtcttttcagttgatttaacaatttctgattatttaatggttatcttgaccgcgacactagcatctgtcggtactgccggtgtgccaggtgttggccttatcatgttagcgatggtgttaaaccaagtaggcttacctgtagagggtattgctattatcattggtgttgaccgtttacttgatatgactcgtaccgctgtaaacgtaacaggtgattgtatggtgacctgtgtggttgcaaaatctgaaggtgaatttgatgaggacgtatttaacgatccaaatgccgctaaagatttagaagactatcataagtctattaagtaataatttacttatgaacgactcataaaaaacccgcttaaatagcgggttttttattgcctatatactgtttaaaactgaagtttaagggtttaagcctttaaagcgcgacattaaactcacacctgctttactcaaaccagtgcttaagcccaccgctaatttatcgctcaaattcttcttaatacggtatttcactttgaagatttgacgctcttttgcttggctcaataaaatatcatcgcttgtgtcaattttatcaactaagcctttatcaaaggcttgagtagcaaaccagtgctcacctgttgcgaccatgtctatatcaagtgaagggcgttgttcactaacaaatgttttgaataagccatgcgtttcttctatttcctgtttgaatttttcgcgacctttgtctgtattttcaccaaataaggttaatgttcgcttgtattcgcctgcagtaatttgctcaaagtccacatcattctttttcaaaattttattaaaattaggaatttgcgcaataaccccaattgagccaacaattgcaaatggtgcagctacgatttcatcagcaacacatgccatcatatagccaccactcgccgctactttatcaatggctacagtcaaatgcactcctgcattacgtaagcgttgtagttgagacgctgcaagtccgtaaccatgcactacacctccaccactttctagacgaacaagaacacgatctttttctttatctgcaataattaaaatagctgtgatctcttcacgtaagctttctacttcgtgcgcatctacactgccattaaagtcaattacatatagacgtgacttagggtcttcactgtgttgtttttttgcggctgctttttgttgtttctggtgagcttttaactctttctttgaaagtgtgttttcgataaagctttgttttaaatcatcaagctgttcacttaaatcatcaatggttatctcgcccttcttcgctttaggttttactgcagctcccatgataatggcaacaatgacagcaatagcgatgacaaatgtgagggtttttgcgaaaaataacccgtactcatataaaaattccaatcaaactctccacttattaattattcgccacaatttaccatgctttaaagcaaaaaaaagccacatgatgtggctttttacttaattggttattacttaattaataggtttcagttattcagtgacaacatctgagtttgtaacctgaagatactgaccacggcttgctaagaaagtcgcaatttgcagttgcatctcagctgtagctgctgcactttcttgtgctgtagcacctgagtcagcagtagctacaggcgttaacactgagctgtgatgacctttagtgaatttaaccacatagctcatcgcatcagcagttggaccttgtgtctcagcaaccgttgataagcccattaagttggcaagaggtaaactaccagcaattggattactagccaccattggtgggataaccatatcagcattgttattttcaccgtcgcccacgacaacactcatgtagactggtgtgccaagcgctgcaactgatgcggcgtagtttgaaggatcaccactatcaagcgccgtttgtgcagcaaaagcaaactgagtaattatgctttgaatattagcaagttttacagtttcaccagccatagttagcgaaccaatgtactctttatacgcacatgtaacaaaagctgtttggttagaagcaagtgaaccacagttagacagcgcttcattttgtgcataagcaccaaactctgcagattcagctgtgcctgctgcaagtaaaacagagccttgcacaaaaggaccaaatgtatttgactcaattaagaaactggcgataccaccgccaccactggcaagtgcaacactcttcacgttgaacattggatcaacttggtcagctagcggtgcattagtcacagcaacaaatgctggagcaactacagagcctaatgaatggcctaagaatgaaacatcttgggcatttaaatcagcagcaccagtaaagttaagacctaaacgtaaccccagtaaatcagcaactgattgacgtaagctatcacgcgctactaataatgactgtaagttcatgtagcttaaaactgaacctgtagaagcattaaagtcatcagtaccatcgccgtctacatctacaccacgctcaccatgcattgggtggtcgattgcagcagttgcaaagccttgcattgttaattgtgctgtaattgctagcatatcttcttttttagaagtaataccgtgctgaagaatcactactggccaaccaccttcaggcattaccagaggatccaaccctaactgaccacgtattgcgttgatcacaggtaaaattggtttagtaacttgtactggaacgttagcaatgctttgtgtttttggaattgtgttgtatttggttaagtgtttagtttgatctaaacctaaatcacgcagttttccaccacttaacgccatacataaaccatcagtttcgctgattgggtctgttgggaatgagtcacctgcagtagatgcatagccaagtacagcaacaccactgtcgcatagcccttgccaataagttgctgataaatcatcaaccgttttgcctgtaggcgttgctaaatacataggtagcatcacgctacccttttgatattgcacaccaccaaatactggtgaaacacctgtaataccttgtgatgcgaatacttgctcaactgtaattacgggttgctctggaatttgaaccattggtgttggtaaggcaggttgcgaaaggctagctgctaaaagctgtttaacagtacctagtacttgacctgctgattgcattgtcatcgcagcagagtaaataatttcatcttttgtaattgcgccacctgaggtgactgcattttcgtagctattaatcaccgcttgcagagatttttgtgaatcagtaattagcggtgtttcttcactaacaagtgcataagttgaagatggttcgattgaacgcccttctgagtccattaaagacgttgttaaaacgtttatgaaggtgctacccgctttaaaaggtttaagtgggatcacggcaaccgcatcaccagaaccttgtgtaatgaagtcaacaccaaaggtaagctcagaaaccaacttacaggcaatgcctgcaggtacttgcgaacaggtttcatctgtttgacttgcgcccataactacttcaaaaatacgaactgcaccaggtgaaccggcagaagccatatcaagtgagatacccgcagggaatgctaaatcgattttaaacggagtttgtgttgaccagccatcaagggcacctagtgcaagctgaggatcagcataggctgcgcgttcaacactaacattgttgtcgtctaattcacccggcatatttaaagtgccatcaagtgtaccactcatcagtaagtcattaggtaccgagataacgctatttgcagggtcaaatttaacggtcgcggttgggatgacaggtggggtgtcatttttaacatcttctaatgtttctcctccaccacagccggtaatgactgacgcaatggctagtgagagtagcatttttttcataatttcgctccgcgcaaatcttattgttattgtgtgttcaaagttaaacgtagttgttctactacctttattctaagttaaattaatgtaattagattattaataagacattagaccagttaaagttaacgtaaagtttcaattttcgccaccttaatttgcaataaattcgataacttggctttttgctatgttaaaatagcaaaaaatctaattgatggtacttttatgcacacttataaagccgcagagaatgcgctaaaagacaaagtaattctaataacaggtgcgggtgatggcattggtcgcgtagccgcattaacttatgccaagcatggtgccactgttatattgcttggtaaaacaactaataaactcgaatgtgtctatgatgaaatcgtgaacgcaggctacccacagccggctatcgtgccgatggatttaaaaggtgcaacaaaacaaaactaccgcgatttagccgcaactatagaaatgcagtttggcaagttagatggtttattaaacaatgcaggtattttgggttcattagggccgcttgaacatttttgtgtttctacctttgaaaacattatgaaagtgaatgtgactgcgcaagccatgatcactaaatttatgtttccattattgcgaaagtcaccaagtgcatctgttatttttacatcctctggtgttggtcgcaaaggccgtgagcattggggtgcatatgcaatctcaaaatttgctgttgaaggcatgatgcaaacttgggcctgtgaagtgggtaaaaccaatattcgcgtgaactgtatcaaccctggtgcaactcgcacatctatgcgtgcttctgcataccctggtgaagatagagataaattagcaacgccagaagatttaatgccaacttatttatacttgatgagcgacgactctaaagaggtgaacggccaatctttagatgctcaacagaagtaagctaatagctagacacaaaaaaagcagctttcgctgcttttctaatctttaagcccactaaataaagcgtttgataataaaatctactttcacacgctttgcctgacccaaaagtttcttaacaggcgcaggataatcatccattgtctctaagtcttgcgggccatttaaacgacgacagtgctgcaaaatagcgtgtttttcgttttctatttgctcaagaatattttgcttcggatcgtcaattaaaatcccgttttcgatatctaaaccccatgctcgtggattcaaattatgcccactaagcaaatgtaaacgcttatctgaacaaattccttttaaatggaaagagttgctttcatgcttccaaagataaacatttaaattgccatttgcgatgtgacgcttctgagactttaaaaacttaagtaggattgtttcatataaataagggagtgcaccaatcttactaaacggctcactaggaggcagataaaaatcgttcgcagttttatcacctaccacaattgttacttgcttaccttgttttagtaatcgacgtaaagagcgcattaatggtgctgggaaattaaagtaaggcgtataaagtactaattcttcttctgtggtatcaaataatgacttaatcaaacgatttagtttattactacgacggcctaagcctaagaaaagacgaacccctaattcacccgcactcgcctctgctgcactttcataacttgctgatttaagatcacgcattaactgcttttgcgcatttttaatatcgttgaagttaactagaggtcgcttatcaatacgaggaacagcctcagaacttaataagtgtgattcaataaactctaccactgagttacacaaaccagcttgatacactaaaaagtagcgatctaaacgataacggtcgtcttgctgcaaatagacattgttaagacttgcaccgctgtacaataaagtatcgtcaatcacaaagccttttaaatgtaacacgccaaaaagctctttcgctttaacaggaacaccataaacctttacattagactggtacttttcctgaaagtcacaatacatactggcattgccatcagattttgcagcgccaattaaacctcgctgagcgcgatgaaaatcaaccagtacttttacctctaaatctggattagctaatgaggcttcgtgtaatgccgttaaaatttctcgacctgcttcatcatcttgaagatacaaagcagttatataaattctttttgtcgctgaacgaattaaacgcaatagttcaatgcgatactcttttgcattggttaagacctgtaagtcttccgtagtcagcccgaatgcgggcttttcctgccaaaataccataattgcctgttcatttatttagctcataactaaagctaatatcaaaattagctaaaacataccaaaaaaatattgcttggtcatgaataaacgtactttgaaggcataacaattgagaaatagttcatttaacaagcaaaaagagcagcttaaatcataatgagtaaggattatttgacagctttgcgatttaccaaaaaaaataatcgagccttttgtttacatccgccttgtttttcttagaatcggtcgcatagacatcgtattgaaacgtttttaggaaaaaccatgagtgacgctaaacactgtaaactattaattttgggttctggacctgcgggctatacggcggcagtttatgctgcacgtgcgaaccttaaccctgttctaatcacaggaattcaacaaggtggtcaattaacaacaacgaccgaagttgaaaactggcctggtgatgcgcatggcttaactggccctgcattaatggaacgtatgaaagagcacgctgaacgtttcgaaaccgaaattatcttcgatcacattaacaaagttgatgtaactaagcgccctttcactttaacaggtgattcaggcacatatacttgtgatgcattaatcattgcaacaggtgcgtctgctaagtacttaggtttagaatctgaaacaaacttccaaggtcgtggtgtctctgcttgtgcaacttgtgatggtttcttctatcgtggtcaaaaagttgccgttgtaggtggtggtaatacggcagttgaagaagctctttacttatctaacatcgccgacgaagtacacgtgatccaccgtcgcgatagcttccgtagcgagaagattctagctgatcgtttaaatgaaaaagcggcaaacggtaatgttgttttacattacaatcgtactttagatgaagttcttggtgatgaaatgggtgtaactggcatccgcattaaagcaactgactcagaagagactgaaaaccttgaccttgcaggtgtgttcatcgcaattggccataagccaaatactgacatgttcgaaggtcaactagaaatgaaagatggctacttagtagttgaatcaggcttaaacggtaatgcgacacaaacaagcgtaccaggtgtattcgctgcaggtgatgtgtgtgatcacatttatcgtcaagcaatcacatcagcaggtacaggttgtatggctgccctagatgctgagcgctttttagataatctataatctattgctaaatactagctttgtaaggggttgtcgaaaaacagccccttttttatggctaaaattttgctagaatcataataaataacaacgataatgctgatatgatcaagcaactttatcagctctcacccgagagtgtagatttcccaaatcctgaatatgccctcgatgagcctgatggtttattagctattggtggtgatttatcagttaaccgcattaaacatgcttataaaaatggtattttcccatggtttagtgattacgaaccaattatgtggtggtcacctagcatgcgcggtattattgagttaaatgaatttcatgtcagtcgtagtttaaaaaagcacttaaaacgtgctccggttcgagtcactgttaatcacgctttttcgcacgttatcaatgcttgccgtgagcaacgactcgacgctgaaggtacctggatcactgagcaaatgatgcatgcttatatcgaagcacatcatcaaaatattgctcacagtgtagaaatatggcaagaaaacgaactagttgctggtttgtatggcatcatgcaaaacggtatattttgtggtgaatccatgtttcataccatcagcaatggttctaaacttgcgatgtgggcattagttaactggctaaaaaaacaccacgcccattttatcgattgtcaattagaaaacccctatttgatcactttaggcgcaaaagttattccacgtagagaatttttaactagacttaaattagcccatagctatatccccacagcaagtatgtggcaaccgcaagagttgattgatatttatgactgagcatttacccgcaagactaggtttaagccaacaatttgattgtagttatttaccaaatcgccaagaacaactattggttattcttgatccaagttgttatggccctgataggtttgaggaactacttgctttagggtttaggcgaagtggtgatcagatttatcgtccccactgcccaagttgtaatgcttgtaactcagtgcgggtgcttgcacagcaatttactccttcaaaatcgcaaaagcgtaaaatgaataaagccaaaaagcgctttactgttagttatagtgatcatgaacgtgctgagtattacccactgtacagtaagtacatcacgcaaagacaccaagatggctctatgtatcctcccgagcaaaatcaatacgcgagctttttattttgcaaatggcttcctgtgacttttattgagttgcgtgatgaggatcggttagtcgcagtcgcggttaccgattgtatgaagaattcactttcagctatttatactttttttgacccagattatgaacaatacagtatcggcagtattatgatcatggaacaaattgagtttgcaaaacaacaagcaaaagaatttgtctatttgggttatcaaatcgatgaatgcaacaaaatgaaatataaaactcaatttttgccggcacaaaagcatattggcgatcagtggttggcgatttaattgacaaatttgagccctgtagctttacttattgccgtattttcggcaaaatctgcagcgtttaactattaaagaggtgttacgctaaacatggcgaaagaagacgtaatcgaaatgcaaggtacggtccttgatactttaccaaatacaatgttccgagttgagctagaaaacggtcacgtagttgtggctcatatctctggtaaaatgcgcaaaaactacatccgcattttaactggcgacaaagtaaccgtagaaatgactccttacgatttatcgaaaggtcgcatcgtattccgtgctcgctaagttagtgcgataacgagaaatttagctttttgctgctttgagtgagcaggtgtgtttattacaaagagctaaaagcgtttgttaaatggtgttaaaactaacttagttttaattccatttaataaacaaaaagcccagcaattgctgggctttttgttttcagctaagaatcaacttaagctgtttctaggctagtctcaaagtcaaagtgaatctttttatccttcaccgagaccttaaccgaaccaccatcggctaattcaccaaataagattgcatttgccagtggctttttaagctcatcttggataacacgtgccatcggacgtgcccccattgccttatcgtagcctttatctgccaaccactctctagctttagaggtaagctcaagattaactgacttcttatcaagttgcgcttgtaattcaacaatgaatttatcaaccacttgcaagataacctctttctcaaggtggttaaaccaaatgatattatctaaacggtttctaaactcaggcgaaaataccttgttaatttcactcatcgcatcatgagagtgatcttgctcagtaaacccgattgatttacgaacagtctcttgcacaccagcattggttgtcataaccagtacaacatttctgaagtctgctttacggccattgttatcggttaatgtgccatgatccataacctgcagtagaatgttgtaaatatcggaatgagctttctcaatttcatccaaaagcacaaccgcatgcgggtttttaatcactgcttctgtcagtaggccgccttgttcaaaacctacatagccaggaggcgcaccaatcaaacggctcaccgcatgacgctcaacatactcagacatatcaaaccgtatgaactcaacgcccatgcacttagcaagctgcttagtaacctctgttttaccaacccctgttgggccagcaaacaagaacgagccaatcggtttatcttcattggcgagaccagaacgagataagcgaatagcagatgtcagtgcatcgatagattggtcttgaccaaacaccagcatctttaagttgcgatcaagatttttcagcgtttctttatcacttgacgaaacactttgctgcggaatacgagccattttagatacaatcagctcaatatctgccacaccaatggtttttttacgttttgatgctggttgcaaacgttgatttgcaccagcttcatcgatgacatcaattgccttatcgggtaaatgacgctcattaatgtactttgcacttaactcagcagccgctttaagcgctttttgcgtgtaacgaataccatgatgctcttcgtaacgttcttttaagccgttaagaatttttgtggtatcagccacgcttggttcaagcacatcaatcttttgaaaacgacgtactaaagcacggtctttttcaaagatatttttaaactcgttataggttgtagaacccatacagcgaagcttaccgcttgaaagcagcggtttaataaggtttgatgcatccattaccccacccgatgcagcacctgcaccaatgatagtgtggatttcatcaatgaataaaattgagccaggttttgcttgtagctctttcaatagtgatttgaaacgtttttcaaaatcaccccggtatttagtaccggcaagcaacgcccccatatcaagtgaataaaccaccgcgtcagcgataacttctggcacttctttattgacaatgcgataagcaaggccttcggcaatcgctgttttaccaacccctgcttcaccaaccagtagtgggttatttttcttacgacggcataatacctgaactgttctttcaacttcgttatcgcggcctaccaatgggtcgatgttaccgtcgatagcttgttggttaaggttcgttgtaaagttttcgagttttgttggctcttcaccctgcacttcttgcacttcttcatggatatcatcatggtcttcaccaccaagatcgtcatcagttttagaaataccatgcgaaatgaaattcacaatatccaaacggttaatgtcggcttttttcagtaaataaaccgcttggctttcttgctcagaaaaaatagcaaccagcacattcacgcctgtaacttcatttttgcctgatgattgcacatgaaatacagcgcgctgtaatacacgctgaaaacctaatgttggctgtgtttctctgtcttcttcaagatcaggaatcacaggcgtggtttcatcaatgaattctgataattcaacttttaatgcgcccatatcaacaccacaggcgtttagcgcttctccagcagaagggttatcgagcagcgcaagtaaaagatgctcgacggtcataaattcatgccgacgcgttctcgcttcgcgaaacgccgcattcagagttagttctaagtctttgtttagcattggcaaccccttactgagataatattttatataccgttgtgacgggttaatcggttcaccctaccttggtatttattcctgctcacaactacaaagcagtggatgctcgttatctcgtgcgtaacgattaacttgctcagctttggtatgggctacatcggcactgtaaacaccgcatattgctttaccgttatgatgaacttgaagcatcacatctgttgctctatcgctatccatattaaaaaacgtcataagtacttctatcacaaagtccataggcgtgtaatcatcattgtttaaaatgactttatattttcgcggcggctgcaatttttgcttttcactatcgcgaactgtatcaataacaccagaatctttcataccactcataataaatatagtcttgtctttagaactcaagcaaacttgaataaaaaaataaataaattgttaaaaaatagcccaaaacacttgactgattggccaaataaactacagtcaaagatagattgattaatcattagtcagtctagcaaattacacggtttagaataactaaattagtcaacttatagaaggatgtagaagtatggcttgtggaaaagtcaaatggttcaacaatgccaaaggttttggttttatcgtagaagacggcagcgagactgatatattcgctcattactcaacgattgtaatggacggttataaaacacttaaagctggtcaagatgtaacattcgaattgcaacaaggtcctaaagggttacacgcaacgaatattgcgcctaacgatgagatctcttaggtgaacctattcgagtaccaagcgagcgaccttgttaagatcctcgcttacttccctatctcccactgatttttattttcaacttgaaattccatttctttaccccaatagtttaattgttattagccctttagagccaagcttgttacactcttgttgcttaaatttagctttttcgtcattttgacgtaaggcttttggctaatttcaaagctagcttatttgagctataagaattttatgcctttttgcataatcaaaagatctattttgcaaattggtattacagtctgtcagctgtggttattttgatactctgtattaagttgcaacagctaacagactgcctgctgtcgttatatcgaaatacttatatttaagacttgatataccatagcagtataattgcattgttgaatatggctaattaagggttactgttagcgcagttacaatcaaacattacgccaactatctaggaatgatgatgacatcaaaaattatctatactaaaacagatgaagcgccagctcttgctacgtattcattgttaccaatcatccaagcgtacacaaacgctgcaggtgttgaagttgaaactcgcgatatttctttagcgggccgtgtaattgccaacttccctgagtatttaactgaagaacaacgaattgatgatgcacttgctgaattaggtgatatggctaaaacacctgaagctaacattatcaaactaccaaacatcagtgcgtctattcctcagttacgtgctgtaatcaaagagttgcaagcgaaaggctacgctttacctgattatccatcagagccaaaaactgatgaagaaaagaaaatcaaagcaacttacgacaaaatcaaaggttctgctgtaaacccggttcttcgtgaaggtaactctgaccgtcgtgcacctagttcagttaaagaatacgctcgcaacaatccacactcaatgggtgcgtggagcaaagattctcaatcttacgttgcaagcatggaagaaggtgacttcttcggttctgagcaatcagtaacggtagctgaagcaactgacgtgcgtatcgaacatgttgctgaaaacggcgatattacggttcttaaagcaagcacgccactgttagctggcgaagttattgatgcttcttgtatgagtgccgctaaacttcaagctttccttgctaaagaaattcaagctgcgaaagacaaaggcgtgttgttctcgttacatatgaaagcaaccatgatgaaagtgtctgatccaatcatcttcggtcatgctgtaaaagtattcttcaaagacgtatttacaaaacacgctgatcttttcaaagaactagatgttgacgtaaacaacggctttggcgatgtattctcaaaaatcgaaagcctagacgcagctaaaaaagctgaaatcgaagctgatatccaagctgtatacgacaacaacccagctattgctatggttgattctgaccgtggtatcacaaaccttcacgttccaagcgatgtaatcatcgatgcatcaatgcctgctgcaattcgttctagcggtcaaatgtggaacagcgaaggcaaattacaagacacaagctttgtaattccagatcgttgttactcaggtgtttaccaagcaactatcgatttctgtaaagaaaacggtgcattcgatccaacaacaatgggtagcgtacctaacgttggtcttatggcgcaaaaagctgaagagtacggttcacacgacaaaacgtttgaagttacagcagctggtaaaatccgtgtagtagacacagctggcacaacattacttgagcatgctgttgagcaaggcgatatctggcgtatgtgtcaggtaaaagacgcaccaattcaagattgggttaaacttgctgttaaccgcgctcgcgcaactaacacaccggcagttttctggttagacgaaaaccgtgcacacgatgctgaattaatcaaaaaagtaaacgcgtatctgccacaacatgatactgatggtcttgagatccacattttagcaccgattgaagcgactaaattctcattagagcgcatcaaagaaggtaaagacacaatttcagtaactggtaacgttttacgtgactacctaactgacttattcccgattcttgagcttggtacaagtgctaaaatgctttcaatcgtaccacttatgaatggtggtggtttattcgaaacaggtgcaggtggttcagcgcctaagcacgttcaacaattcgaaaaagaaaaccacttacgttgggattctttaggtgagttcttagcgcttgcagcttctttagagcatctagcagttaatacaggtaacaagaaagctcaagtacttgctgatacactagacaaagctacaggtactttcttagctgaaaacaaatcaccttcacgtaaagtgaaagagattgataaccgtggttcgcacttcttcctttcattattctgggcacaagaacttgctgcacaaaatgatgacgcggaattaaaagcgcaattcacgcaaatcgctactgatttagaagctcaaaaagagcaaatcatcactgagttgaacgatgcacaaggttcagcaatggatgtgggtggttatttccaaccaaatgatgagcttgcattcaaagcaatgcgcccaagcacaacatttaacgatattttagcaaaattagtgtaattcgttagaactcgctaatcttctaaaaaataagagagttatctcgattgctgaggctctatgagccttagcaaaagagcaactctcttttttataccaattcgcttaattaaaccgtctactttgatgcaataaactggctgataacaaaacacaaacttcgttatctactggttctcgaaaattgcctcaacattgcgctaattactacatccatacagtcataaataagtaatttttaaagctgttaaaaagctttaatctcttaaatgattaagcatgactgccaactgatattattccttccacctagtcagctgttcataaaccacaacatataacaatggctacgattcagttttaacttataactaagcgtttgctgttttcgcctttttgtttttagccatacgtttagcgcgtttaatggcagatttttttgatgctttcttttgcgctatcttgagcactatggcctcttttagttgctttttagctgctttaagacgtttttgagcattcttagcaagactttcagcttcgtttgctttatcaacggctgcttgggcttgttcagcggcctcttttgcaatcgcagcggttctttgtacttcttttttacttttagcgaggctcttctctaactttgctaggcgctcgtcatacattggatctgtaatttccatttcactctcctaatcttaacgttgagacatttttgttggttcaccaacaattaatgggtcaacttgatcaacaatttcatggtctttgcctggataatctaaacaacttaaaaagtgacgcatgcagttaatacgaccacgttttttgtcatcagaacgaatttgagtccacggtgcgtctttagtatgggtatgaaacatcatggcgtcttttgctgcactgtagtcatgccatttggctaatgatgccatatcaaccgggctcagtttccattgctttagaggatcgttttggcgtgatttaaagcgtctaaattgctcttctctactcacagaaaaccaatatttaaataatttaataccactgttaactaacatgcgttcaagctgaggtgtttgccgcataaattcgaggtattcttggtcttcacaaaaccccatgaccttctctacgccagcgcgattataccaagaacggtcaaacagaattatttctccctttgcaggtagatgattgatataacgttgaaaataccattgatcacgttcacgggtagtgggtttttcaagtgctacaacatgcgccccacgcggatttaagtgctccataaagcgctttattgttccaccctttcctgctgcgtcacggccttcaaataaaataacaatttgttggttagtctctttcacccaaccttgcatttttaatagctcaatttgaagttcatgtttatggcgctcatactctacaacatccattttacgcttgtatggatataggccatcagcattccattttaaatttgggttctttacatttaagtcaaatacaacatcctgtttagtttttcccttacttacttttgtaggcttacttacttttgtaggcttaattaatactgattcgacgtttactgtctgcatggcaactcctttttagtaaatatttacgtaccttcattaagaactgtatatttttactttatgccagttgcagcattatttattgatctacatctattatttatcgatataaaaaatcttaaaaatatttactttagttattttttactaacaacaccaaggagtatatgtaataatttttggttaattttaaattagaaaaaaattaccaactttaaatagacaagaacataagtaattaataaataataattaaatttcacatcttaagatcttttattgtaagaagactaactaaattagttgaagctgtcttttattgactcattacttttattttacctaacttaaaaccaataaaataagagtagtaaagaaaataaaaatagagaagatagtattagaacaatacttgttgatgaaagggttaattaaatataaaaacaggctaaaataattgagggagcataaaaagctccctcatatggcacagtttacatacgcacaaggcgtgttgttgatgcagttatttaacaatccatggggttgcgctgatcaaccgagcacttgtttgcagttttgtttgattgtcttgccaatcatcagtcaccattattgcacaacggctttgcttgcaattatcagcctctgatattgccacattttcatccgcaaatttaagcacaactccctgttgctctggcaacaaaaaccacattaatttactgacgaagaatcctgataaatcagatagcaattcatcaaactcttcattcaactcatataggtttgcttttgtcagtgcaaagtcactcaggttggttgcttcaatttgtagctttaattggcaatcatgctgagggttctcaggttgtacgacaattaccgccttatctgtatcgagttgtttatcaaacggtagcaacaactgggcttgatctgtataggtaagatcaaattcttgttgttctgttattattttccctgacttaattttgcatacatcatttgtagcaatgtcagataaataaaagtttacttgcgcgtactgaaagtcacctttgttaaccactttaaggcggtcataaaagccatcatatgcaacaacaaactcgcctgcggttgctgttcctacagaagcacctaaggtagcggctaacactaccgccttgaaacatgacataactttattcatcaaaatatgctctgttttgatttatcattgtgtttaactcttcaatgtaagcttctcgtcgctcagaataagataacaaaccctgcgttaaaactgtggcttcaataggcttttgttgacggcgtaaatctgctcggattgaacgtaaatctttgtatgccgcatgagtattaatgtttttaaagtaagagcttacagcagctcttacagacttaaaagccgttacttcatgagcagcttcatcagcacgacggcgtggtaccataccgcaaccttttttgtagcaccactgaccaaaaaagttaaggccaattcgcgcaaatcgcgatgttccccaagccgattcattcgcagcctgcatcaaagcaagttcttttggaataatatcaacacggcgtaatgcctgagatagtgacagtacatcaatcgtcgtcggcagtttataactggtgaggattttctttatatctgatttttgtttaactgttaagggctcattatattccagcatcatgcgagctatttctaatgttgctctttgctgcaaaattttcttattttcagcctcaacatgcgggcgtataaaatcaaaaaatgcatgtttcttctcttttacatcactgaacgcagcaaaatcagggagtttaacattatgtaatggcttctctttttttatagttttctggctgcccttgctagctgcaaggtcttgtgaagatacgtcaacatcactttcattatctataaaaggtgacaacagtgcccaagtaaaaaaggcagctagtaaaatttgaaaaacgtatttaagcatgtattctctcaagtaaactactactcatgtgcggtaacatcacacacatacaaaggcggagtatatcaaacaagccaatctttggcgaattcggcgctatttttttcaccgcaatcgtatttaaaaagtctcataattcattcaatatactcgcaattttcaagcggttgcgtatactttcattaactcagtcgcgaaaccataggcttttttattatgtgccaaccttggcaagcacgaattatagatcaacaaaaatatcgtcccaatgacaaccgctcaccatggcaagttgaccgctctcgaataatccatgccgctgctttcagacgtttacaagcaaagactcaaattatgggtattggcctaaacgacttttaccgcactcgcctaacccactctcttgaagttgcacaaatcggcagtggtttgctgcgccatttaaaaaaacagcaccctgaatttgcacacttcccgagtggcagcttgctcgaaaccttatgtcttgctcatgacattggccatccaccttttggtcatggtggtgaaatagctttaaactacatgatgcgcgagcatggtggatttgaaggcaatgcgcaaactttacgcattgtttctaaacttgaaccctacagcaacggttatggtatgaacctaacgcgccggactttgttgggatttatcaagtaccctgcgtttattgatgatgtatggcataccatcccaccattatctgatacgcgaagtttcataaaagccgatcactggcgaccggctaaagggctttacaaagatgataacgatgtttttaattggattattgcgccgctatcacaaaacgacaaagcattattgactagccactacaaggtggatgagtttaggtctaaaactcattataagtctattgactctgcaataatggaattagcagatgatattgcctatgcagttcatgacctagaagatgcgattgccactgaagtactaacgtttgctgattggcaaaaccatgcacttattcaattacaagaactcaattcaccttggttagcaactcatttaagtgcaattaccgcaaggcttttctcacatcatgaatatgaacgcaaagacgccattggtgagttagtaaatacatttattatccatgcctctttagaggtacaaaataacgaattcgaatcagagattttacaatataccgttagcctgcctgatgagttttcaaaaatactcaatgtgctcaaacaatttgtattcaagcgtttaattcgtgaacctaaaatgcaacaggttgaatttaaagggcaaaacctgcttatagaattatttagcgcttttgctagcgacccgatgcgtttattaccagaaacaactcaagagatgtggttaaacgcacacaacaataatggtaatgcaatgcgggtgatctgtgattacttatcaggtatgagtgacgagtatgcatataaaacctatcaacgattatttttaccctcagcctaactaattttttgaacagctaaatattatgttctaaaattaagtaggttattttagcaaataacctactaattctttatggattttagccaatctgcttaccttatgggcagcttgagacacgaatactttgatgagctttgtacatcctgtcagagctttgtgggtattcctgctcaatttgagcctatagtaacgtgggctggttttattaaacatggattgaaataatgctcaaaaaacacctgcttcttggtttattagttgctagcccatttacaggctatgcagcagaatcacttcctgatccactacttgaagaacgcggcataatcataaaagatgccactcattttgattggatccgacttaactctggtgaatggctcaaaggtgagctcgtttcaatgtacgataaggagctcgaattcgatagcgacgtactcgatactctgatgatcgaccgcgaagatatctacatgattatttctgaacgtcatcacacagttcgttttaatgatggtgaagaactcagcggcacactaaatatatcgggtggttatgtaaaagtaggtgatgctcctgctaagtatcgttatcgtgatttagtctctatcgctccgtcaattgatagtgagcttagtgcttggacagtaaaaatatcattgggcgccgacctatctcgaggtaatactgatcaaactgaatattcagccagagccgatatcaaacgcagaacagcgtcgagtcgctttttagctgaatttttagggtatcgcaccaccagcgatgagcaagtcactaaaaataacatacgagcaaatggaaccttcgactggttttatacgcaaaaaatgtattttcgccctattttctttgaatactatcgtgacccatttcaaaacattgccaataaatacactgtaggtgcgggtgtaggttattacgtaatggataccgacaaaattgagtgggacttttcaacaggtcctgcttatcaaaaaacagagtttgataccgttgcaaatggtgaagataaatcaaattcttcaatgtcttattttgttggcactaattacgaactggaagtaaccaaaaatatcgattttagttttaactatcgatatttgacagccagtgaagacactggtggcgattcacagtatgcaatggcaagctttgaaatagacgttactgatgacattgattttgatatttcattagtctgggattatctatccgacccgatagccgatgaaaatggtgtagtccccgaaaaagaagattacaaaatgattttcgcactgggtatagatttatagcaattgctaaaaaaacgccgagcttaagctcggcgtttttattttagttgagtaaatattatcttatagcgatttaacacccatgttgtataaggtaaagccataaatatcagcgtattgatcaataattttactggttggtgttcctgcaccatgacctgcatttgtttcaatacgaattagatacggattttgtttcgcacctttttcttgtagctcagcagcaaacttaaatgaatgcgcaggcacaacacggtcgtcatgatcccctgttgttactaaggttgctgggtagctaacaccttctttaacattgtgaactggcgagtagccttttaagtactcgaacatttctttactttgctcactggtgccgtagtcatacgcccaaccagcacccgctgtaaaggtgtgataacgcaacatatctaatacacctacagcaggcagtgctactttaaataactcagggcgctgcgtcataaccgcaccaactaataagccaccattagagccaccacgtaccgctaggtaatcaggtgagctgaattgtttttcgttaaggtattctgcagcagcaataaaatcgtcaaaaacattttgctttttaagctgtgtaccatttacgtgccactctttaccgtattcaccaccaccacgaatattagcaacagcatacacgccaccatgctcaagccaagcggcaacagttggactatagcttggtgttaaacttacattaaagccaccatagccatataaaattgttggatttttaccgttaagctcagtgccttttttgtatgaaataatcatcggaactttagtgccatctttagatgtgtagaacacttgttcagatgtgtattgttcgctattaaattgagcgcccgacttgcgatatacatcagactggccagaatcaacattaaatgaatagatgttgcctggtgtggtgtaattggtaaatgaataataaagcgtttcagcgtcgtgcttaccgctaaagccgtatgcggtgcccacacccggtaaactaatatcacgcactagtttacctgacttatcatactgttttacttgcgaaatcgcatcaaccatatacttagcaaagaaatagtcaccgccttttgaaatactaagtacatggtcagtttcaggaattaaatcttgccaattttctgggcttggatcagcggcatcgactgtcactacacgcatatttggcgcatttaagttagtcactaaatacagtttcgagccatcattatcaataattgatgtatctgaatctgtgttatctagaatggttactaacttgctgtcaggcttagttaaatctttgataaacagtttattacctgatgttgaagtacttgcagcaattattaggtatcgattatcacgcgttacctcagcgccaatataacgatgtttctgtgcttctgtaccaccatagactaattggtcgtcagcctgtgctgtgcctaacttgtgataatagaccttatgttgatctgtttttgccgacagctcactcccttttggcttatcgtagcttgaataataaaagccatcgttaccaaaccacgaaataccgctaaactttacatcgactaatgcctcttcaataggctgtttagtcgctgtatcaataacgataattttacgccagtcactaccaccttcagaaatttgataagcagctaaacttccatcttcagtaaaagttaagcccgacattgaggttgtgccatcggcgctaaaagtatttggatctaaaaacacttcagcttcagagtcaccttttttacggtaaaccacatactgattttgcaagccatcgtttttataaaagtaagtgtactcaccctctttaaatggcgctgtgactttttcatagttcatcagcttttcaagtgtggttttaagctcatcgcgataaggaatatttttaagataagaaaaggtaacgtcattttcggcttttacccactgcgccgtttcttcgctcatgtcgtcttctagccaacgatacggatcggctaccttctggccgaagtactcatcaacaacattgccttttttcgtttctggataattcacagcagctttaacctctgcagtttttatagtttgttctgtttttgttggggtagattcactacaccccgtcagtgcaaccacaattgcacaagcaagcgcttttttaatcataataattttactttttagttattgttaacaaaatgaaagtaaagttaatacaaaagaatgtctagttatttgcggtcaaacacaggaagcgctgtaaaccaatgtaaaaacaaaaaaccacgcaatagcgtggcctttaatttttcgcaatagtaaacactgtttgcgtaattatacttttgttaaccagccatgagtatctgctgatttgccccattgaatatcattcaatgcttggcgtaatttagcgactttttcacctggttcacccgaccctactttaaactcttggtcgttatgaataagcgtgccaaccgacgtcagtaccgcagcagtacctgataatgcagcttcagtgcccggcttagcagctctttcaagtaactcagacacagtaaagttacgctcagatacggtcatacctaaatctttcgcaatcgttaaaatactattacgcgtcacaccgtgtaagaatgtgctatcaagtgcttttgtgatgatttcatcaccatcaattagaataaagttcgcagcaccggtttcttgaacatcgccacctgggcagaataaaatttggtcagcttgatgctcagagcgagcttgtaagattggacctaatgcacttgcatagttaccaccacttttaaccatacccatgtgaggtgcacagcgcatgccgtcttcttcaagtaatacacgcagtgcagtagcaccacctgcaaagtaatcacccactggcgaaagtaatacataaagcaaggaactcattgacggtgcagcggctttaccaattgcggcttctgtaccaatgtgagttgggcgaatatacatagaccccggcggtgctggtgtttcgtctgcatactctttaacaatgtctttgatcatttgctcaagcatgctttcgtcaaagtcaggtaagtttagtaatttagagctttgcttcatacgagcaatgttagcatccatacgaaagatatagaccgagccatcttcgtgacgaaacgcttttaatccttcaaaacaggtgcttgagtaatgtaatacgtgtgcacccgcatgtaattcgattttatcagatgggaccagcgcgctttcactccatgagttatcagcaaaacgtgcttggatcatttgtggcataaatacagtaccaaatgcggccattgttgttctctcttgtttggactacttttgccccattgtatgctaatccatccctgtttaaccatagcaaactagtgccttttctcgataaaaacgataaaaaaacgttcgcctggtataaaaaatgcgcaactcatgtgcgcattgtttaatgataattatttatacgcttactaagcgaaattacctgtagttcatttttgctgtgaggcgattaaaaaagcccgggaaaaaacgctttatagtcggtgctaagccacttattccttcaccaataacaacttcatctttctcggcttcaatggctttaatcatttttgcagccgcttttgccacatccatgccgttttcgattgattcctctggcttattttgcggtttaccttggccatctaacgaattatgcgcaattgcagttttaattgaacctgggcaaatggttaaacattttatatttttgtcggctaactctgctcttaagcaatccataaaacccactaccgcgtatttagaacccgaataacctgttctgaactttgaaccgactttacccgctacactgctaattgaaacgaccatgcccataccctgttcaaccatttgcggtactaccgctttggttaaagctattaaaccaaaatagttcacttccatcagttggcgatacacagtgaattcattttctaaaaataaactacgctgcgacaccccaccgttattgataagcacatcaatgcggccaattcgctcaatcactgtgggcatatcttcaagtaaggcttcgggttttgccaaatctagggcaaccacatgatgattgccaccgagccttgtatttagagcgttgagtttttcttcattacgagcagacaatatcagcactgcgccctttgcagctaattgctcacaaagtgcttcaccaattccagaagatgccccagttacccaaactgttttaccatttaattgcatatgtgttcctttttattgttgttatgctttgttagggcctgcatgttgttcgatatgttcagcaatatctttataaaaaccaagcataatcaaaaactctgctaatacaaataacggccctatgaccaaaccaattaaatcatcaacaaaggctggctttttaccttcaaaataatggccaataaactgaaatacccaacctacaacaaaactaccaatacttaccgctagccataattccacgtcaagtgacaccacaggctcagcggcaatactcaacaaacttaagcatacagccataattaaccccattgataaacttagcatcaagtaataaagacagctaagtacaatcaccacggttgccaaggagataacagcaggctctgaaataagcgtgactcgttgcaataaacaaataatcgcaaatacaattaatgggatgccaataaaatgggtgtaaatattacgtttagagcggtgataaagagcgtaatttgtcagttgttgctttaatgttttcattatttttcctgccaaaactgtgttcaaaattcagattagcagaaaattcaccgtcaagaatgtcaactaaccgacatttcaaaatggctatattaaacttacacatcaaaccaacgcatcgatgaccttgcctttttcagcttctggctgcatatccatgcgttcgcgtcctttttgatattcttcatcaagcattccttgcagctcattcattttttcttgcagtgctttggtgtcgacaccttgttgctgcatttgttcggcaagtttttctatttgcgcttttatttcgtcaattttctctttatcaaccccgagtcgctgataaaccaaggcttcttgcgcctgtgctaaaaaagaactgggctcagactgcttttgtaaaagttgctgtgctgaagatgcaggcgtatgcatggccttcatatcatcgatgcgggttgtttgcgacagcttagcagcagccgaaacctgataagggttatattgattatgaaatgttattgccacaagttgtcttccgtttaagcttgattacaactttgtagcaattttagttccaaactagcattgagattgtaatttttcgatgtcaattacttcaattgattgatatttaagattaataattgaatcagcttgtagggattgtaatatttgattaatggtttgccgtgttaaataggtcatatcggcaagttgttgctgggtaagcggcaaacagctttggagtgacgactgataaagcatgcataaccgcttactcaccttttgcttggccgtgaggagtgcgtgatcttctaatgagtcaaacaggcttcgcactttatcggtaagcaacagcccaaaatcatgccaataagcgggatgctcttgtaataactgagttaatgcccgctcaggcacgtgtagtagccgtaccgcagtttgtgcatatacatcgtgggtgcgtcgaccgccatcaaacaaagcaacctcaccgaaccacatcgcactggttacaaaactaagcaccgcttctttgccttggctattaaccccagaaactctaagcacgccattaataacacaatacagaccggtattttcatcaccacgcaaaaacaatgcatcacctgcctttaaggtgattaatttagcatgtttaactagcttgtttttaaataattgtgtgcgatttttaaaccatttgtcttggttaattaccgaaaggtcttgttcattcaagtggttatactttacattgattaaataattagtaactaataataaaaggatacgggatgttaaacaaactactttcgaccagcctacttctcagtgcgatttcgacccctgcatttgctagtgatattaatactgaacttaagtctgccaataaaagcgtcagcgaaaaggtcattaaatggcgccgtcatttacaccaatatccagagcttagtaaccgtgagtttgaaacagccaaatacgtggctaagcatttacgttcattaggccttgaggttcaaacaggtgtagctcataccggtgtggttgccaaacttaaagggggcaaaaaaggcccgcttattgccctgcgtgctgatatggatgcactccctgtgaaagagcaagtaggcttacctttcgcgtcaacgcaaacaacagagtacaaaggcaataccgttggcgtaatgcatgcctgtggtcatgataaccatgtggctattttaatggcggccgctgagtctttagtaaaaattaaagatcaactagcaggtgatattctgtttatttttcaacctgctgaagaaggtgcacctgatggcgaagaaggtggtgctgagcttatgcttaaagaaggcttatttaaagaaaagccagaagccgtgtttggtttacacgtaaccagctcacttaataccggacaaattggttttcgtgaagggcctctaatggccagcgccgacaagtttacaatcacagtaaaaggccgccaaactcacggctcacgtccttggaatggggttgacccaattgtagcttcatcacaaattattatggcaacacaaaccatcgcttctcgccaagttgatgtgaccaaagcgccttctgtggtttcatttggtgccattaatggcggtgtgcgtaacaacatcatccctgatgaagttgaaatggtgggcacaattcgtacctttgaccaagaaatgcgtgctgacattaaaaagcgtttagctaaaaccgctgagatggtagctgaatcaggtggcgcagaagcacatgttcacattgaccatggttacccagtaacagtgaacgatgttgaattaaccaagaaaatgacaccaacacttgctggtgtagttggtaaagaaaacctgatcacaacgccacttatcacaggtgccgaagactttagttactacgccttagaaacaccaggcatgttctttttcttaggtgtcacaccaaaaggtcaagatgcagtcacagcaccaagtaaccattcaccacacttttttgcagacgaaaaagctttacagcttggcgtaaatgcaatgacgcaattagtggttgattaccttaaataagcggattgatataatcactaatcctactggcgggtgacatcattacccgccctattttcttagctgttcagcatcaataaagttcattttgctagggtttagttactataaacaggtaaggaaaccccatgacatctgaatactttcattttttaagcattatcggtgtagcgttttttgctatttctggcactttgctgggccatgaaaaaagtgtcggtggttttggtgtggtggtcgttgccacagtcaccgccttgggtggtggaacacttcgagatatattgcttaacaaaccggtattttggatagctcagcccgattatttgtacgcaacttacatagccatattcgcgtctattctatcaattcgtcacttacccgatttaagcaacaccaccatgttattaatggatgccgtagggatggcgattttcaatattattggtatcgaaaaggcattgattggcggcgcagatatgattgttgccatcaccatgggtatgaccacgggtatttttggcggcctgatgcgtgatgtgatctgccgtgaagtgcctctagtaatgggcgaagaactttattcaaccgcttgcttatctggcggattaacttacgcggctttattcacccttgaggtgagttatatttggtgcattcttggcgcatttgctgtgacagtatgtttaagattaggcgccatacactttggctggcaacctaatctgtttcgtaaaagcagctttaaacgctcttagcaagtcatataaatacagccatcgagtggcatgtccgctggatactgggtttgtataaaacccagtttttcataggctgttttagcaagggtattgtggctatacacaaacaacgacaagctatcgcactgcaactgctgtttgccctgctctcctagtaaatttatcaacacttttgcaagacctttgcctcgctcacttggcgcgataactagccgtcctaaatggcaacatccttcacgtaaatagtattgcccaaaccctaacatctggccttcgtcattaaccagcgcgtaggaactcagcgcatctaggtttaaatcatttttaaagctttgcgtatcaaatggataactaaaaaatggcccagaccaaatacgcagttctgcttctgtgttaaaccaccccattaactcgttgagttgctcactcgttactttaactagcttcatgttttaacctatcgtataaacctgatgcacgagtaacagatttattcatcgccataagcaatacatttttatcggccaccagctcaaatgtggttttcgcgcgggtgatccccgtataaaccaattgcctgttaatgccctgattagcctgttttattggtggtaaaatcattgcagtgtaagcaaattcagagccttgcgacttatgaattgtcatggcatacactttatcgtgagcaggtaaacgtgcgggcgaaaaggcgcgaatattttcttgttcatcaacaaacatggcttttaactgaccttgctcatcatgcattaaaatacctatatcgccattaaacagttttagctggtagtcgttttggctgatcataattggcatacccacataatgcctttgatatggcgaaattaaaccttgttgagccagtgctttttcaatacgctgattaaggctatttacaccgtaatcaccctctctgacggctgccagtaactgataatgcgcaaatgctttatgcacattggcaacacttgccccttgctggataagctgcaaataatcgtgatattgcaacgccgcttgttgcacaaactgctctatcggtttactaattacgctgtaattaagtttaaggtctttaaagccaccttgattaatcgtttgctctacatagcccagtaagcctgtgttattggtatttacagcttgtgctaattgaccaatgccgctgctgccatcaaaacgataactttgctgtaaaaacgcaatacaatcgttaagtacaaaatgactgctcgccgcgggtatttcgctctgattattaaaacaaacgcgattaagctgcgctgctctttcactgctgtaatcaggcattttgccaagctctaagccttggcataggtcgctaagaatactgcccgtatcaaccgaggctaattggtctttatcacccagtaaaataagtcttgcatggcttggaagtgcctcgattagttttgccataagcgataaatctaccatcgatgcctcatcaatgatcagtacatctaaatgcagcggattacgcttgttatggcgaaacttgttggtatgcggaataacgcccagtaaacggtgaatcgtttgcgcgctgtcaggaataagtggcgcgatattatcagggatcatatttagcttttgctttgcccctaaaatcgactctgttaaacgagctgccgctttacctgtcggtgcaaccagcttaattgttagcggcgcactggcatacaaggattgtaatatggccagtagcttagttaccgttgtggttttaccggtacccgggccgccggtgatcacactaaaaccttttgttgcagcaatcgcacaggctactttttgccagtttaatgttttaataggatcgcttgggttgggtgtatgttcactgctaggaaaatacacctcaagtaatgccgttaatgcggcttcatctagggtcagctctttcgttgctaaatgatgtaaacgcgatgccagagtggtttcgtattctgccaagcgggcaaagtaaagtttattcgcaaacaatagcagtggcttgtcgtcccctacacaatcagcattcactagtttattaacagcctcagtaaggccaaattctgccgcaaacggtgttaaaacatcaggggctgcgatgctggcatcagctaagctttgatgtttaatttcaaacggattttgccagtttatattcgctagctctaaacagctgtgctgactttgctgcgctaccgcaagcaataaaatcaggtaaaaaacctcactgtgcgctgcatcgttattctctatcaacgattgtgagccggtaactgtttctgaaccagtcaatagctcagcgagtttaacatcaaccaagcgaatacgttttgcctcaagtaaataactcagtaatggctgcgttttaatctctgtggcaggtaacgctgagtcgctttgggcatgttgtgctggctgctgtggttgcttattcattggctcgtttggctcatggtcatcaaagccgaatgtcatttgactcatagcatggctccttgtgcgaataggctatcaagctcagttatttgctgttttgttagctgattaaaatacaccccttgcccttcgctcataccacgtaagaaggtgtagtaaacaccgcctaaatgcgtgtcgctatcgtaatcttgaatacgttgttttaataaacggtgcagtgctacggtataaattaaatactgcaaatgatactgatgactggtcatggcttgttctagttgctcatgttggtaatcagccgcactgttgcctaaaaagttcgatttataatcaagaatataatacttaccctgccagcaaaatatcaaatctataaagccttttagtaagccttgcacctcactaaagtcgagctgcccaggtaagttaaaatgttttaccaacacttggttaagcttatcgcttgagagcgataacagcggtaaattaaattccatttcgaccaaacaggtatcaggctcaagtactgataaactaagccctttatcgttcaatgggcaattcagcgcagcaaggatccactgctcggtcatttcctgccagctatcatcaatatggtatttttcgaataacgttttgatcactttatcaagtgcatggtcatcttgttcgctggctggacgctttaacgcataagggtcggtaaagtctaattgctcaaaaatttcatgcaaacaactacccggcttagcacctttagggaagctgtaaggagttaaagcattggcattttgggctaaaaactcatctttttcgtggtcttcatcactgcgaccaagttcaatatggtcagtatgctttttcagcgttaagctactaaagctggttgagcgccaatcacgctgaatgtctgcttttacagtattaacttgataggtttgctcactgtcagctccagcaaatgttaacttttcaagctcatctgcttggcgaaacgcctcatagtgcatgtgcgctgagccttcacaaaattgttgtaacaacgcgcgccattcatcgcctgatttgatctctacccctgcaaataatacgtggccaatgctggtactttgaataccagggcgagcactacgaccttgcgaaatgttatacatacccacagaacaaaaatgcacggcacgagtcagcgccacataaagtaagcgtaaatcttcagccaagcgctcttgctctgctttttgcattgcctcgtcacttttagcaaggtcataaatcagcttaccgtctttatgataaagggcttctttgctttcccgatagccacaggcaaacggcatgaatacaatcgggtactctaagccttttgaggcgtgcatggtgacaattttcaccaaattagcatcgctttctaggcgtacttgcaccgcttcaccatcttgttgactaactttttgcgcaaaccaacgcaacaatctgtgggtgccctcaagctcaatttgcttttgctgtaagatttcccctaaatgacggaaatcggtgagccagcgttcaacgttgtaacctaaaccttgccaacgcgctgcgagctggttatggcttaataaacgctcgagcatcgccatagcgccttgtttatgccaaatatgagcaagctgagcaaaaaagtttaaatgttcttgccacgcactttcattttcgtgaagctgataaatgcggttgtagcttaagcaaaacaatggcccagcaagtacaccgcgcagtaatgattcatcatactgtccatgcaatgccgttaaaaagttcagtaaatgatgactaagctcttggttaaaaacactatctcgcgataaatacacactggcaatggcggcttctgccagtgcggttttcatcaactgtgcttcatttcggtcacgcactaacacacagatatcagcggcagtaagaggttttcctgcaatggttgcagcgcctgcatcagcttgcttgagtagctcggtgatttttttcgtatattgcaaagccaatgcttgttgagccacccctttgctggttggcttgttgttggcttcggcgtattcatcaacaaaaaccgaaaattcaaatgcacttggcatttcaccgtttattaaaaacgctttgtcttgctgttttcccttcgcattaaccttttgaaatgggattgcgtcgttataaataaagctattgtcatttttagaaaataagcggtttacgctatcaacaaccccttcacttgagcgatagttggtatctagggtgtattgcttgtcttttgctacggcttgttttgcgccaatataagtgaaaatatctgcaccacggaaaccataaatagcctgttttggatcacctatcatggcaagggtggtgtttttaatgccataaatacggctaaaaatgccatattgaactgggtcggtatcttggaattcgtcaatcatggcaaccggaaacaaggcggcaattttttcacttaatgcttggccttgctcacttaaaagcgcctgatgcaagttactcagtaagtcatctggagtaataacaccttgttcttgcttgcgtttaactaatgcatttgcgacccatttagctgcgtattgcactatcgcaatattcaatccgttattgataaggctactaagttgcgccatttcatcaaaccgagccagcatttcgtgactgagtaagctaccgtttttcttgtaatttgcagggtcgcttaaattctctgtgctccacacttcaaacgagtatttattagtaccaaatacaaaaaacaactcgtcattgtttaagtattcttcaagcgctgcaaggctgttttttcgccctggggtttttgagccacttaaatcagacgcttttacagcattaataaactcactctcacgacacgcctttttaaatgccgggacttttgccacaaagttatcgcgtgctcgccatatatcgtcaaggtcatactcgggggtgattgttgccccttgtttattgagtaaactcaccacctgtgaatacagtgatgcaggcactgggaaaatatcggtaattgcttgcgtgcgctcttttgattgtgggtaaacaaaagcacgccaaaagtcattaagggtttcttgaataagctcacgctcatctaaaataaactctaagttaaacgccacccctgattcaaaagcatgttgttttagcattcgctgacaaaagccatgaatggtgaatatggcagcttcatccatcgactttgccgcagcgtctagcaaatcaaatgcggcgtgtttgtcagttacctcgtcaattacttgctcaatcagctcatcatcgggctctttgccaagcagagcatctctggcattgattatacgcgctcgcacacggtctttaatttcttgggtggcggcctcagtgaaggtcaccactaggatttgctctacactaagcggtgtatttaattgttgatcttccccggtcgctttttgtaagcccaacaaataccgtaaatacaaacctgtgattgtataggttttacctgtaccggcactggcttcaataaggctttgcccacacagcgccatactcattggattaagcgtttgcatgatctgcctcctgagctaattcaacgagtggcgataacagcagctcgctccattttataaactcttcttcacagtctttaaggctatttatggttaaacgaatatacggattttcaccctcacccatgcctatgtattgcggcgcgaatttattgtttgctttgaccatatctttatctgtttttatgaactcgtaaccactgaccggaaaaaacgccactgggcgagttaaaagcgtttcataaagcaaaaaccaatcgtttaaatacttgcgggcatcgtcttctgacaagggtgaaaaactaatttgcttgtctaaaccaagaatgagggtttcaacaggttgccccattatttgcgccgctaaatgatgcacaaagccacgaattacatcttttgctttaatactggcggtgcgataaaacacctgtttttgaccataaatatgatttaaccaaccttctaaagtggtgttggctattttaatatttacttcaacgggtaatgcttcatcaccttgaatatgcgctttcacttgccctgcaagcgcatcaactcggtgctgcatactttcaaacacaaggtcgccaacatgggcttggggtaattcaccgcgctgcattatttgcgctttgttaagcggtaactcttgaatgctagcctcgagaatttcgtcaaggtaaaagtagcggcgtaatgcatctaaactaaatggctcttcatctttagcaatatcgttaaattgcggtaagcgtaaacccaaactttgttgataaaagctctcgtgcggctggcaaatactgcgaataaactgagttaactcaacactgctttctggctgaacactaagcgcttgctgtggctcagggttaacagcttgagttggcatccacacagggttatagctgtgtaatcgtgtggctaaaggtttgtttgctttttgctcgtcatcagtttggattttattaccttctttgttagtggtcagataataagctgggttaaatggctgtaagtgctgataattaatcagcgcctctggtagctttaagtgagtgtcttgatcagcaaattcaaaactacgggctatgtattctaaaagctcgctcactaaagttgagggcattcttggttggttatcaaagcaagagcggccaatataactgatgtatagattctcacgggcacttaaaatcgcttctaaaaacaggtaacgatcgtcgagtttacgagagcgatcgcctttttggcgttttgagtaaggaactaagtcaaaaccaattggctgaacggtacgcgggtaatccgcatcatttaaacctagcatacacactactttaaatggcactgcacgcattggcatcagcgtacaaaagttaacttgccccactaaaaagcgctgccctacgcctttttcttgaataccttgttttacaaggtaacttacaatgcgctgcgaaacggcttgttggtaatcaccattgtcataatgcttaatcagtgtatcaagcactttttgcagcactaataaatcccagctttgttcgccttcatcactgtatatatcgcttaataactcttttagaatttctgccttttcgttaagtggtgcatcagcttgcagcttggctttataacgggcaagtacatcaataaattcaatgagtttatttaaggtattcagtgccatgccttcaacttcatcggcactgtaaatccccgaaaacggcaattgttcatcacgttgcgcaacgccaagtaacaagcggtttaggccatgttgccaagtgtttaaatctattgcgggtaagccaaaactgtctttgtgagcggcatctaagccccatttaacgccaacgcgttcaagccaaaaacctatttgctcatactcatgggcttcgaggttaaatttttcggcaatttgcgtgacttgcagtaaatcaagaatgtcagatacaccaaagcgtgagtatggtaaatcagctaaactagcaaacgaactaagcacaggtttttcttgctctatggctaaatcggctaacgcataagggataaagcgtcgcccttcggcaccaccaaacaccgcctcaatatacgggctgtatgtgccaacatccggcatcattacaataatatctttcggtgttagcgctttattttcattgaataaattgagcaagtaatcatgtagtctttctacttcacgaagtggagtgtgacaatcgctcagcacaatgctggtatcatctgcctgaattggcagtttgccttcgtcattaatgaaccattctttatcaggcgttaatgactcacccttgaaggctaattggtaaatttcagactgaatttgcgatagcaagctttgatcaaaatcgttatcgaatccgtctagccactgcgcatctagttgtagtagctgctcaaaatagtctcggcctaatttaccccatgacgagagtagcggattaccaataaaaaagtactcgtgatcagggtttttagcgctgtcttcaagtgcttgtaactgcgggcgtttggcatatttagcagcaattttggctgctgttttttcatcgagtgtgtcgccccagtaatgctcactggggttgaagaaaaacaaaaatacctgcgtttttttcgcaatagcctgaaacacttcaagctggctgctcgcaattgcagaaataccaaataaactaatacgctcaggtaataagcttgcgtccattttttcaagggctgcaaggagtttgtcttgcatgttggcgcggtgatattggctttgcccaagctctttactgtgcgccaccagcttgcgccaaagatctggctgccatggcgcaatacccacatcaacatcatcaagctcatcgatgccctgctcccaagtggtaatccaattggggcgatacattaagtattggtcataaacgtcggcaattttctcgcacaaggcaaaggttttttgcccctcactgtcaccatctaaataggttttcagtggtaaatacagcggctcatcaatgcagtttggtaaaatcgcaaacagcttccaagcaaggttagctttgttatacggtgattcactgggtacatctggcaataattgttggtaaagctgccatataaaactcgaaggcagcggaaagtcgacctgagcggcaatccctaagtgttcgcttaaacctatttttagccactgcgacatacccggtgactgcacaagcacaatttcttttttaaaggggctcgttaatggattaactttaagaagagcgtgaaaccgcgcttgcagtgcttccatgcgatttgattgaattatattcagcactttacactgtccttgcttgaaactaactaattgacacagtgtaagatattttaattagatgggatagagagaaatacccgcaaacaaggcttaattccatgtttgccatgagctgcgggtacgtattacgggtatgcgctacaggcaatatttactggtatggacttatcgtcgataacgcaaactcggtgtgcatgatctcatcacccttaatacctttaagcgcaatacgaatggtaggatctgctttttgccaatcgattgttaaatcgccgtagttaacctcatgagtgtaatcacccacacggtgtttattagggctaacatctttccacttttctgttagtccagagctggtcatctcataaagtgggtaatctaggttttgttgatacttagacaactccccccagtgggtatcgccactgacaataattacaccgtttactttatgctttttaataagcgtaaataaacgctcacgatcagcaggataattagcccatgactcccagcctgtaaaatcagccaatagctgtaagcttgaggcaatgatttttatcttttcgtctgacttaagctcttgttcgagccattgccattggctttcaccaagcatagaggcgtttttatcagttgttgggctataaggcccttgttttgcgggcttacgttcaagttggtaggtcaccgccgatacatgattcagcggtgcgcgattaaaacggagatctggcatgatgacttttacagtttgctcaccttcaccgtacgtgtacgaagtgtaaataccatcttcacgagtcctgcgagcagaatccgcaggctcttgccaaaaatccagcatgatttttcgtgactgctgttttttggggtattcactgccagcgtcattttcgccataatcatggtcatcccacatggctattatcggggtattcgcacgtaatgttttaaagcccggcttttgtcctaagcgttgatatttatcggcaagtaccgacatatcttcggtatcaccataaatgttatcgccaaggaacataaataaatccgcttgctctttgttgatggcatcaaaaattggaatagctttgtcttgatgaccacatgagccaaacaaaattttacttggcgcagcaatcgcactcacactactaactaggattaacccagataaggtgcttctaagaaaactaagcgttaaactcattttaaaatctccttaatcggcgccgccattttcggattaacatgctgacgatttacacctaaaatgctcagcacagttgccgctacttgcgcttgtttgagctcattgcttggctttattaagccctttgcttttatatctgggccgatggctgctagccaaatgtgttcagagccaacaataccatttggaaagtgcttaatagcttgctctgaacgtgctagagcacgcttcgaactatgatgctgccaatcatcagcatggctgccacggccatgatcggtggtaatgatcaatgtggtattgtctttatagcccggtgtttgttgaattgtttgccaaaggtcacgaataaacgcatcactttgtttagccgattttaaataggcatcatatttaccgttatgagcaaagtcatcggtttcacccaagctaataacaagcaaacgcggctgtttatttaataaatattgtttggcaaatcggtaggtaaagctatctaggcgaacattgtgccaagggcttgggatctcgctttgcatttggtttagcagagtcacttcggctgatttcaccgcctcaaaagattcaaagccagcattaacaaacactccacttcgttcgcgatttacaatataaggaaacacatcccagctaccaaaaagcgcggttttacctttaaactcgggttgagaatttaaactctctaagatggttttattggggttaggcactttatcgttgctatcgatattttcatctacaatgccggttaatatttcactgtaacctgggtatgagaaataccacgggttgcttaccgacataaatgaaccttgagctctatcgccaatcaaaacgccctgctttgccagtgtttcgctaaaaaatggcattaacgcttgagtacgctgtgcttggtcatctcgccaaaaaagcgcctttagctcatctgtatctgcaacaaaatcagtgttatcaattaagtttttgtctgcaccagagaacacttcttgccagcgaagtccatcaagagtaacgagcacaacattgccggcagctttactatttaggcttaaaaaagatgctgcgaccactgccgtcgctaaaattatttttttcatatatcacctgctaaaaagcccatcaaagatgggctgtttaaaacgtcgcttattaattagaactgcgcagtaagtgttaaagctgcggtacgtggtgcaccaataaagtaggttgaaccattaccagtaccacccgctagatatgatttatcaaacaggttattaaccacaaatgcaaggtcgagtgatttaaaaacacccgaatcaaggctggtgttataaccaatgtttaaatcaaccaaggtgtagccatcaaccttgttacgtgtacgggtttgctcatcagtccatgcacctaaacgctcaccggtgtatttagccgataaaccaaagcggaaatcaccactgtaataatctgccgataccacaaataaatcttgtgctgagtcaatcacttcatcacccgctttaaagcttgcagatgcttcatcaagtaactcaccatcgccgttatatgcacttggatcgttcgattgatactcagagttattgtaggtatacgatgtgtaaaggttccatttgtcagtcagcatatagcttgcagaaagctccacacctgttgactcaataccgcctacgttgatgtaagaaccgttcgtgccaattgtgtaatcaataccatcggtatcactgcccggggcaataaaagtaatacggttatcaaattcaatgctgtaagccgttgccgttaaacgtaaacggtcatcactgtaacgcacacctaggtcgatgttttcagctgtttcaggttcaatttcggtcagtgttgatgaatcgcgttcaagtacgccatctttaattgccgcaaagttttcgctgtagctggtaaataactctgtgcttgcagatagctgatacaacacaccgccgctgaatagtacgtctgaatcactgtcgattttatctgaatattcatcttcaaaatggttataacgctgcagttcaacaagatactgtttagcacccaaattaagtgtgaaatcgcctaaactgattgagtcttgcacgtaccatttgaatatatctgtttcaaacgtgttcttgtactgtgtccaataaggtgtttggtcaaaatgatgatagacacgggcatcaataactttatgccagtcacgtgattcatcgcggtctgtttgttcaaaccaaaagccggcttcaatatcatgattgccaagcgttacttggtactcgccggtcatacctaagcggtcttttttgtagtgagtatgacgatacgacataaccggaatggcatcatctgggtaacaggctgggtttaagccggggccagatgcccatggccactctaaacttgcagtacaacccgcagctggtgcaagtggattaccgtcgctatctgtaaagccatagctgcctgcgttttcaccaccaattgttgttgggttaccatcgccatcaaccggtgacgttaaataaggcgggatccaatcgccacgacccgagtttttatggtagtaaggcgacaagcttaagtttgaagtggcacctaatgcgtaatcaaactttacatacgcaagggtattttcacgcagtgtaccccagccctcagcaaacatttgatcaaaatgcggcacgccagtccaattccaagttaaacgatcccaatcagggttttgttcaaactcactaatgctgatgctgttatagttaatttcgtgaacatcatcatacgaaacacgacctgttacggttaaatcgctaaaatctgacacaaacttagcttcgatatgctggttgtctttaccaccattgctgccatcgccaatccagcggctagtgtctgtttgcgaatagctaatataggcttgcgtgttatcaaacacagtgccggtttcgtgcttaacaaagtaacggctagcattgtgatcgcccgttgtataagcaaacgtggtgctttgctcagtactcggttgtgcactcacaaaattaaatgtaccgcctagcgcttcgagtgatgcagaggcaatatcagacgtgccttgccctacttcaaccgttgctaaattttcgctgtcgagataacggtttgcttttgcgccgccaccatagttagaaccgccattaggaataccatcaatcgtcatacctaattgctgttgattaccatcgatactaaagccacgcatagtaatggttgttgaccaatcgtcaccaccgaatgcatcaccttcgttgatgctgatacccggtaagttatcaatcacggctaacacacttgatactgaactttgttgctcaagcatggcaggttcaatgacgttatttgcataactggttggctttgcaacaacggtaatttcttcaatttcgttattagtgtttgcatttgccgatgttgctaaaagcgttgcgattacaaggcttagttttgtttttttagttactgtgctcattgtttttccaaggttacgtatataaaagcgggcacagtatgcagagcgtgtatgacatttagggtcaaaatttttgacacaacagttaaaaaattaatgcattttcatggcagatttaagactcaactgtttaataaataagaaagtattagaaaaaacgcccagttaaattaactgggcgcttgttggttggacaatattattagatttgcttaaatcaactcagccagcatttcttcgctatatggtgttaacgcttcaccatttttaactttactgatgtaatctgggttcgcaatgaatgggcgaccaatcgcaattaaatcaaattggttgttatcgatagcttgatttgctgtttcaaagctatagctacctacccctaccagggtacctttataagcaccacgcatatattcagacgccgacttattacctaaacttgcaaagcgcatgctgtcatcaaaaataccaacatgtaggtacgcaaggttacgtgtttcaagtgctggcaatagataatcaaatactgctttatcaccgtcgctttcagtcatattaaaatacgcacctggcgataagcgtaatgctgttttatctgcaccaattgctgccactacagcatcaacaacttcaagagcaaaacgcgacatgttttctggtgtttgaccgtattggtcttcacgttgattggcagcaaagtgtaagaattgatcaatcaagtaaccattcgcaccatgaatttcaacgccgtcaaaacccgcttcaattgcattttcagccgctttagcgtaatcagcaattaaaccttgaatgtcttcaattgttgcagcttttggggtaacgtaagttaactcgcgcattcttggtaccgacccctctacaccaattgctgatggtgctagaacatcaccaccaaaaaagtgagggtgtgcaacacgacctacgtgccaaagctgagcaaacattttgccgcccttcgcgtgcacagcatcggtcactttcttccaaccttgaatttgttcactggtaaatagacccggtgtatttgggtaaccttgagcatctgggcggataattgttgcttcgctaataattaaaccggcatcggcacggcgcgcataataatcaaccatcgcttgggttggaacgaggttatcgtcgctcatacagcgtgtaagtggggccattagtacacggttttgcagctcaatactgtcgtttaatttaaacggagaaagtaaatcggttgtcatggttttatccttatcttgaacatacattcaagataagggcgaaacatacacacttcaaggtttattttgaatattcgttcaagattacgtaaacttcgtttataccaattcgcttaattaagtggtctattttgaggcaagaaaacctcgttgataacaaggcaaaaatttcgttatttagttgttctaaatcagaaatttttaacgcgggtagcgacaggtttaatccctcaaaataactaagtattattgcggattggtattatataccgtgaggagctttaatgagaactgctgaatttgatactgaatttgtactacgccaagccatgcatgcctttatgcaatatggctatgcgaagaccagtatgcaaaaattaaaagaagtgactcatcttcatccgggctctatttacgcggcttatggcaacaaaaaaggcttatttttagccgctactgagcagtatcaaaaagacagaaaccaacaatttactgccctttttaatgaccaacaatcaattttatcgaccctcaaacattacttaactgtgattgttgatgaatgtattgaaggtgaagttgccaaggtatgtttgcttacaaaaagtatttctgaggttgaaggcaatgatccacaaatttgtagtgtgctgcgtggtaaccttaatgcctacgagaatgccctcgccgaacaaattcaaaaagcccttgataacaacgaatttaaaagtagtaagccagctcaacagttggcgcgctttttagtaatgggtatatacggtattcgtacctatgcactaacaaatcaagatccaaaatctctgcaacaacttgctgacgatctattcgctgcattagtaaattaatttagctattaactttacttgtcatatttatttatcaccttatgattaaggtgtagctgtgtataactaaaagagtgagcttgtcatgaataatgcaactgctaaacgtgttgaaactgagtttgatgctgtactcgccttaggcgcaaagaaacgactcgcttatatgtttgaaacggttcaagagtttaaacaagtatggatcctcaatgatgaacatggctgtgtcatgctctctaacgaagacgacgactgtgttcctgtatggcctagccgcgagtttgcacaaagctgggcaaccggtgaatggcaagattgcgagcccaaagcgattccagtaaaagattggttaagtcgctggacacccggccttgaacaagatgacttactgattgctgtattcccaactgatgaggatgatggcacgattttattccccgatgagtttgactcgcaactaagagtgccgaaaaaacgattttaaatacaagggagccatgcgctcccttttttatgctatttgttgtaagcgcagtgctgaaatatcttttatcggtggcttaccaaaaaagcgagtgtactcgcggctaaactgggatggactctcgtaacccacttttaaagcagcagagcctacatctattcgctcatttagcattaattgccttgccgcctgcaatcgtaagttttttacgtattgcaatgggctcatttttactacatcacgaaaatgcagcctgaatgttgacgggctcatgtgtgcatcacgagccaaatcatcgattgaaaattgactggtaaagttttcttttaaccaacataaggttttggcgattttttgatgggcagagccagacatcacaatctgtcttaaataagggctatgcggactatttaataaacgcaatatgatttcttttttaattagtggcgcaagattagcttttaaatgtggctcattgtcgagttgaataagcctaagcaaagcatcaagtaagccgttatcagtatcaaccaccgacatagcttgatgtttagggaacttgtcttgccctgcaaactccatttcagcaacaatatggcttatttcatgagcatctaagcgtagatataagccgtaaaatggctgctctttactagcacgagtaatatgtgaggcaacaggcacatcgactgaggtcacgagtgattggccgtcagtgtaatcataactatgctcacctagtaccactcgctttgcgccttgcaagctaatgcccagtcctaattcatacacgcaggccatcggcaatgaaacttcgcttcgtctgaacaccaataactctggaatagctgtttcaaaactaccatctgcaaccgctatcgctttcactgcttctaataatgcctgacgcatttagattacctctaataaatactccattaagtgtatcaccgtaatttgaagttaggaccatttaaggtaacagttcgttgctttaggcaaaaattacatcatttatggcaagcagaaaccgccatcatcgaccataatgtattttcaatttttcgattacatactctatgtaatcagccactgctacaaaacttcaatatattcaatacctaaaatcaaaagagaaattatgaacccaaataacacggatctatttgtgtttgtcgcggtcgctgctttggtaaccgttcatgacaagcctttgttaaaacgagcatgtcagcacgcattgaatgatggcgtatcaatgcaagagttgtgtgatattttaccgcatattagtgtgtattctggggtgccaaaagcattgttggcgctagatattttaaactcgcttgatgatattcaaggttcaaattcactgcttatcaaacgcacagagcagcaactaaaaaccgcactgacattgggtcagctgcctttagacaaaaagcaacaaaacaacgccgtgtttgagcttgcctctttaggtgcattatttgcgttagacgatgccagcagcttagttagtgagcaactaaagcgctgtgtaatacttggctatagccgtgaacaacttgaattattagtaatagaacttgccagaaaggtcagtagccacatagccatgcgcgctaaatgttatctcgaaaagcactttgctatggtaggttaataaaacctgccaaagcgctattttcctcattgactttaattcatgtaacaacttttcgtttcctcatatcgtttggcaaagtaactctgaaaaaccttcaaacaactatactgtagaacattgaatttacttaattaaccatccttaagttacgaaaaatataaattaaaccaagatgaaaaacctatgattttgtctatatttaagaagatataacttaaatagtgaattgtattaatgaaatcaacgattttgggaaagctcaacttttttaaaagtaatgggttcacattggtagagcttatggtggctatatcaattatagggatcttatccttaatcgccctacctaattatcaaagctatgtaaatgaatctaaagcagctaccttgttatatagaatccattctatagggcttgcatatcaggatgttatagcaacttcaccagatgcactggcaaagccaaatgagctttcaagttcaagttttggtcaagccccaagctatttaccaggacttgccagtcagttttctgaagagtttgatattggattttcagctcaattagttaatcattctgggttttttaattttaccggtcatgaggcttttcctgttttatttttaaaagcaaatagtcaaaacggtttaaatgtacttaatgccttagatcacataactgagttaaaacactctttcgtgactcctaatattatgattattgcgttagcaacaccttatgagacacaccaaacaaataaagaacctttagctgcaaattcaaaccttcccaaaatcaatcaaccacctaaattagctaatgctgggactagcaagcaacctgaagcaagtaataatggtaacccccaacttcctgatgcaagtaacacaggtaacaccccacctccagatagaagtagtggtgatagcaacacgggtagccaaacgagtacaagtacagaaactggtacaaatggtgaatcagaatcaggcagtcgcagtaatgcaggttctaacttgaattggcctccgggctgggtaaaacaccctgaacaacatataggtcagcagcacggccatcacgaataaataactaggaagataaaaatgatttcaaccaataaacgatggcaagaaagtatcgcgcaagctatggatgaaacgcaaaatactcaacgaaataaaaatcgatcttttattgttttaccgagctggcttccttatgcaacatatattgcttttgggtttttgttagcaaaagcactagttatcggtcatgaaactcaccctgtaaattatgacagagattatcaaacgggcagctcagttgcattattaatgattgcagaagatgttgaacattaccgcacaacttacggagaactgccagacgatttaccaagccctattgcatctgttatggatgtaacttatgaaaaaattaccaacgaacattttcgcctaaccattccacatggtaattcaacaattacgtttgatgccaaagacgacaaaatatatatggaatgagtatggctgataaacatgaagtacacagaagtaatgccacttttaattggctaaaacgattttgcattgaaaaatcaactaacagcaatattaatattgaagaaatgtataacggtgaatctgcgatttcagcatggaaaagtgcagaggcaattttgcaagtcgacagcaaaatattaactgaaatgattgcaaagagttaccagttagaggttgcaaaacctcctaccaatgtgccggaagaattgcttcattatgtttctcttaaagtagccagagagtatggcatttttcctgtaggctttactgatggcttattaacagttgcttcaccccacccatttgatactgatatggaagcaatggttgaatttttaacgaccctgcatgttaagtcagtgttggcatcacccgagctcatagcaaaatggacagaaatgttttatcaggagcaaatgctatctgaaaatgacattattataaaaacaacccaacttaacacacgaaccaaacgaaatgagcccgactcttcaaactcagccatcgttaaaattgtatctgaaatgctgttagaggcatttatatttaaagccagtgatatccatatagaaccctttaataatggcggcatagttcgttacagagtagatggcatgttaagggtcatatcagaattacctgcacaagtttttatcccaataatacaaagaataaaagcattagctggccttaatttagcaaaaaaaatggtcccacaagatggtagtgtgagtttagagcttaaaggtcaggatgttgatctacgggtatcgacattacctgttaaagggggagaaaaagtagtcatccgcctgctaatcaaatctgttgtaaacaagttagatgatattggtttacaacagcaagagctcgacacatttaaaaacttactgcaaagtagcgaaggtatctttgtgataacaggccctaccgggtctggaaaaacaagtacactttatgctgccttaaaagaattaaactcacccgaaaagtgccttgttacagttgaagaccctatagaatatgaaattgaaggtattgcccaagttaatattaatcctcaacagaaccttaccttctccagcgccctcagaagtattttaagacaagaccctgatgtaatattgatgggtgaagttcgcgatgaagaaaccgcagaaatgacctttcgcgctgcaatcaccgggcattttgtaatgaccaccttacatactagtgatgcaattacgactatttcaagattaataggcttaggtgtgtcacggcctattattgccgactctttaaaaggtgttgcagcacagcgcttaattagaaaactatgccctagttgtaatctaagtggcccattggccacagatacccatggcaaacgctttaaaagcatctttcctgatataaatattatgtcgccatcaggttgcgatgagtgcgatcacactggttacaaaggacgcattcctctgttcgaaataatcactatagactatcaactagccgatgcaattagagctggagagagtaccagtacgttaagagaggttgcagctcaaagcggtgcgaggtctttatataaagtggccttagaagcattatcaaaaggcctcacttcagcagaagaaataaacagagtattaggacagtctttttggaaagagtgtgaaagaattaacagcttggataattagactagctaaaatacgcctttaaaccatttgagaataattaaagtaagagtggtagaaaaagaaatggcggtgacggagagattcgaactctcgatacgttgccgtatacacactttccaggcgtgctccttcagccactcggacacgtcacctaaggcgcttagtgtttagcgcggcgttatagtatgaaaacaaccctacagacgcaagggctttttaaaatagtgtagttaagtgattagtaatcaaacaaaaaaggcaaggtaaacaccttgccttttgtatatagacggttagttgttaacgctgaagcgttgcagagaactctaacatacggttaagcgactttaatgcgccttcgcgtaagtccatatcaacaaacacttctttaccttctgggtctgtcagtgcttcttcaatcgcttttaagccattcattgccatccacgggcaatgtgcacagcttttacaggttgcgccttcacctgctgttggtgcttcaaagaattctttctctgggcataactgctgcattttgtaaaaaatgccacggtcagtcgcgacgatgaactttttgttgtccatggtttgcgctgctttgataagttggcttgttgaaccaactgcatctgctaaggctacaatctccgcaggtgactctgggtgaaccaatacagccgcatctgggtgtaaggctttcatatccttaagtgctttggttttaaactcgtcatgaacgatacaggcgccattccacatgatcatgtcagcacctgtgttcttttgaatataagaacctaagtgtttgtcaggaccccaaatgattttttcgccttgctcatctaagtgctctacgatctctagggcacatgaagaagtcactatccaatcagcacgcgccttaactgcagttgatgtatttgcatacactactactttgcgatctggatgctgatcacaaaacgcagagaactcttcgattgggcaacctacgtctaatgaacaggttgcagcaagtgttggcataacaactgttttatttggcgtaaggatttttgctgtttcgcccatgaagcgaacacccgcaaccacaattacatctgcgtcgtgcttagcgccaaaacgcgccatttctagcgagtcagcaacacaaccacctgtttcttcagcaagcgcttgaatttcaggatcagtgtaataatgggcaacaagaacggcgttcttatctttcaataattgtttgatacgtgccttgtactcggcttgctcgtcttttgataacggagctggctttggagggaagatataatcttcaggcataatttgttcagctagactcatttctcgaccacttagtccacagtgcattcatggcgcgaattatacgagaatcttaagctaaagaacagtattgctgtgcgctgttaagataaataaaggataacttagatagaaaaggcaagtaagagatggtgggtcatgatggacttgaaccatcgaccaatggattaaaagtccactgctctaccaactgagctaatgacccgctctgaatatttagatgcgtaaatccgccgatgtgagataccatttttagaaatggtgggtcatgatggacttgaaccatcgaccaatggattaaaagtccactgctctaccaactgagctaatgacccgctctggatatttagatacgtaaatccgccgatgtaaaataccattttaaatggtgggtcatgatggacttgaaccatcgaccaatggattaaaagtccactgctctaccaactgagctaatgacccgctctggtatttaatgcgtaaatccgccgatataagaccattcgaagaatggtgggtcatgatggacttgaaccatcgaccaatggattaaaagtccactgctctaccaactgagctaatgacccgctctgtcgcttaattaaagctgcgtaaatccgccgatttgaataataccataaaatggtgggtcatgatggacttgaaccatcgaccaatggattaaaagtccactgctctaccaactgagctaatgacccgctctggtatattagtgcgtaaatccgccgatatgaccattcaaagaatggtgggtcatgatggacttgaaccatcgaccaatggattaaaagtccactgctctaccaactgagctaatgacccgctctgctgcttattaaaagctacgtaaatccgccgatatataaccattcaaagaatggtgggtcatgatggacttgaaccatcgaccaatggattaaaagtccactgctctaccaactgagctaatgacccgctctgatgcttataaaagctatacgtaaatccgtcgattaaagattaccattctaatagaatggtgggtcatgatggacttgaaccatcgaccaatggattaaaagtccactgctctaccaactgagctaatgacccgctctttttccgcaattcggctgttgttaccaatcgcctgctgcgggcgcttataatacttatttaaatgctgagtgcaacagaaaatatctctttttttaagtttttatgtctagatgcctaattttagaccgcttaagtcaaaaagcagtctaatcaggtcaaatctacatttgcgacagacgttctgtggctaattttgcagcagtcgtacttgggtactgattaattaaatcattaaaggttttaagtgcttgctcgcttaaaccttgatcagctaataagtttcctaactttagcatcgcatctgggcgcttgttagaattaggatactcattgactacttttttaaagtgttcagtcgcacccgcttgatcattttgtattgttaacaactgacctaaccaataatgtgcattagatgcatatactgaattaggataagtcgttaagaatgtttgaaactcaggaatcgcttgctcataacgtttatctttcatgattaacgctacagcgcgctcataagcctcgttttcagataagtctgaactaatcgcttgcgtagcccctacatcggtatagctgtttgtaggttgagctggcgtagcaggttggctatatgcttggcttacacgattctcgatttcttggtacaactcgcgttggcgctgaagtactttttcaagcttatagctttgctcttccgtaataccacgaacttggcttacttcgtcttgtaatatattaagctgctgctgaagctcagcttgtaataaattacgtgacttcatcatgttttctaacgcgactaaacgcttctcaatgctcgattgtgagcttgcagcttctgaaacaggagcgggagcagcccataactgggtgctcccgcttaagatcattgctgccaaaataattttcggcttcataatgactctttattagtaaactaatactgcgcgacggtttttcgcgaacgcttcttcagtgcgagacttaaccattggcttttcttcaccatagctcactactgacatttggctagcagaaacacctaagctttgtaaatatttttctacagcttgaccacggtgctcacctaacgcgatgttgtactcaggtgtaccgcgctcatctgcgtgaccttcgattagtactttaactgatgggttttgtactaagaattcagcgtgtgcttgtaaaagctcagcatatttgctttgaatttttgcattatcaaaaccgaagtaaatgatttgctcttgacgtaacgcttcgtatttttgacgaagtgcttcttcagcttgctgctctggagtaagtgttgcaacttcaactgtatcattgttgtttgattgctcaaccataccttggttagattggtttgcagcaccttcatcaagatcagaagaagagctacatgctgctaatgtcatcactggcacagcaattagcaggccttttaaagttttattaagttgcatttaattgattcctatattgagtaaaccagtaaaattactgtaaataaggcgaccaagccggtgccttaacttgtccgtctagtacaggcaaacgtgctttaaagcgaccatccatagaaactaacgctaatacctgtttattattatgaagcgtgctatagataatcatcgaaccgtttggcgcgatacttggcgattcatctaggcgtgttctcgttaacacttggaacgcaccagtagctagctcttttttagcaagatggtatcgaccgtttgttcgattcaccatcactaattcttttccgtcaggtgaaatagaacctgctaaattcatatcaccatcaaacgtcattcttttagctctgcctgtttttaaatttaacttataaatctgggcattaccacccctttcagacgtaaacacaatatcttcaccatttgggaaccaagaaggctctgtatcgatgctgcggtgatttgttaggcgtgtttctttacgcgtagcaaggtctaaaaggtatacttcggttgcaccattgcggtctttcgaaagtactaaaagtagctttttaccatctggtgaaaactgtggtgcaccattgataccttgatggcttgtgattaactcgcgcttaccggtgtaaagatcttggatgtaaatttggctttgacgattctcaaaagttacatacgcaagtttggtcccatctggtgaccaagctggtgacataagaggttctttagagcgaagtagaacttgttcattataaccgtcgtaatctgcaacaacgagctgataaggttttggctcatcatcacgcacgataacgtaagcaatttttgttaaaaatgcgcctttttcgccagttagtgcttcgtaaaccacatcactaatgcggtgtgcataacggcgaaaaccggtttcagaaatcacactttcacgggcgtctaaaatatgatcttggctttgcattaatttgccattagccatcatttttgtttgtccgccggtgatttgcccacgaataacatcaataagttcatattttacaaggtagcggccgccaggctgttgctctacttgaccaacaagcacagcctcaacgccttggttaacccatgcgccatagtcaacatcagcatctttgcccggtaactgcggcatgtttgctacatcgattggcttaaacttaccactgcgcattaaatcagctgcaatcactttatttaattcttcagggataggaccaacaccttgatatttaaaaggcacaaccgcaattgggcgagcgccatcgataccatcggtaattacaatttctaaggcagcactggcaatgccatgaaagcccagtaatacaataaaaaacgcagtttttatctggttaaacatatcattcctttaaaatttaggtgctatggttaagtttatattttttagttgctcaaatacgtcacgatcaggtgatactggtaatgtatctgccatacgcactgcacgcattgcagcttcacacactaaggtatcaccaccaagcgattttacttgagtcacaaggccattaaaaccaagacgtatattaaggcgacactctttgcctttcatcttctcatcttttaagaagttttgctgaatgcgtgccattattaacgctttgtatttttcaacttcgcctagaacttgttgttgacgtaccttgttacgtgcagcttgctctgctgctaactgttcttgcagcatttgttcttgtaaagcttgttgacgcttacgttcagcttcttcagctttacgtttacgctcagcttctgcttcagctgctttacgcttacgctcttcttccgctttctttaacgcttcttcttcagctttacgtttatcagcggctgcttttgctgcagcttcagcctcttgcttttgcttttcagcttgtttggcttttgcacgttctttctcttgaatttcacgtgcttttttcgcttgtgcttcagcttctgctttttctttttccttagcacggcgctgctgctctagctttttaagacgacggtcttcagcttctctttgcttacgcgcttcattagctcgacgctctagctcttgaatacgtttcgcttcggcttgtttttttgcttcttcttgctttttaagctctgcaattttctgctcaacctgttgttgatcaacggtaacagcagacactgctttttctggtgcaggtaacgctggattaaggtttacttccatgactttaggagctggcatatgaaagtttgcactcgctactaaaaaaccaacgatagcaaggtgcaaaataaccgattttattattgatgcacgcatactactcctcgaatgattcagtcattaaaccaacagacggaacacccgcgtttttcaaaaagtccattaatagcaatacttcttgataagaaacacggccagagcctttaatcataaccggagtatctggatttttctgcagctgtagctttataaccgcggccacatcaagggcctccatcggcgcttcagggtcagtaccaatactgacataatatttaccttcggcatcaattgaagcaatgatcggtggtgtatctttggtatcaacaagatcagactcttccattttcggtaagtcgacttttacaccatgggtgataagtggtgctgttgccataaatataattagcagtactaacattacatcaatgtaaggtactacgtttatctcccctacagggcgacgtttcttacgctgatacattcgctttagcctctatttgtgtagctgcttggcggtgtaaaatattagcaaactcttccatgaagttaatgtaattaccttcaagcttttctactttgtttgcaaaacggttgtaagcgataacagctgggattgccgcaaataagcccatcgctgtagcgatgagtgcttctgcaatacctggtgcaaccatttgtaacgtagcttgcttaacttcgcctaacgcgataaacgcattcatgataccccacaccgtaccaaataggccgatatatgggctaattgaacctactgttgctaaaaatgaaagacttgattctagtttttctacttcgcgagacaaagcaacgcgcatagaacgatgcgttccttccatcacaatacttgcgctttgaattgaatttttcttatggcgagcaaattctttaaaacctgcgacgaaaagtgcctcaacaccagaagcgcctccaggacgggctgacacttcattatatagtttacttaaatcaacgcctgaccaaaacttttgctcaaaacgctttgcgccattaagtgcatcagaaatcgcttttttacgttgaaaaataattgcccatgacattaccgacataccgactaatgccaacattactagctggacaagtacactggcttctagaataagatctaaaaagttaagccctgatcccacgttaaactcctaaaatagatttctatataatttgttatattttttacatgcgcactgtttgaccataaatgaggccaaaagttgtgcctagtgtatatagtcagttataaactgacaacgctcttgctgtgaattagcggcaattaacggtaaaaagcaaattgcttagctattttttagtcatattaagtttcactcgtctttttgtgcatatttttaccttaataaaaagtcattacaaaaatcctaaaaagctaataaaacctcaaaaaatagcgcttttattcaaaaaacacgcataaacacccaaaagcagttttgcaaatctactacagaatacttaaactaatcctgaatgaagttcataaaatttttaaaacccactttattcatgagcttaaatataaaaacaccaaaaagcgaacaaaaagcacacaacttaaattttcactcacattagttttttttatctgaaaataaaatttttctagtttgaagaaaaatccttcattgcgtattatttacttataccgagctagcaacctcatgaaagagtctttcattaagctcagttttttgcattatgatgtttcgtattgctccaggttaatttgcacaggataaaacctcgttcaaattggccatagtttccaagattacttccttcaacttgttgtttgcccgcatccttatgcgggcttttttttgcctgagcaaacgtcaacgagaatacctacagctaacttaacagcatgtgaattacagatgttaaaatgatactaagcggtaagcggtaagcggtaagcggtaagcggtaagcggtaagcggtaagcggtaagcggtaagcggtaagcggtaagcggtaagcggtaagcggtaagcggtaaatcctatcttgctaataaataaaaccaagttacctaaattaaaaaagcagcccttttgagctgctcgaaacttataaataaaaagcttgtaactaagctttaggtttgattatttatcgggtgttaaaccaaagtgaaggtaggcaatatccgagacaagtcgtccgcgtggcgtgcgttgaataaaaccttgctgtattaaaaaaggctctattacatcttctatggtttctttttcttcgcctatggcagcagcgaggttatcaagaccaactgggccacccataaatttttcgataatagcaagcaagtatttacggtccatataatcaaagccacttttatcaacatcaatcatatcgagtgcttgctcagccaccgaagcatttactttaccgtctgagcgtacttgggtgtaatcacgcacacggcgcaacaaacgatttgcaattcgaggtgtaccacgcgagcgcttggctatttcggccgcgccttcatcacacatggttaaatttaaaaagctggcagaacgagtaacaatttttgataagtcttcaacagaataaaactctaagcgctgtacaataccaaagcggtctctaagtggtgaggtgagtgagccagcacgagttgttgcaccaattaaagtaaatggcggcaaatcaagcttgatagagcgtgctgcggggccctcacctatcattatatccagctgataatcttccattgcgggatataaaatctcttcaacttgcgggctcaagcgatgtatttcgtcaataaacagtacgtcgccttcttcaaggtttgttaaaagtgcagcaaggtcccctgccttttcgagtacagggccagacgtcgttttaatatttacgttaagctcgttagcaacaatgttagcaagagtcgttttaccaagacccggtggaccgaatattaataagtgatcgagtgcttcaccacggtgccgtgcggcctcaataaaaatttccatttgttgcttaacatgcggctggcctgtgtaatcgttaagaagctttggccgtatagcacggtcaacactgtcttcgttactttgctcagatgcatcaattaagcgatctgcttcaatcatggtttactcacaacattgattttagagcttctttaattagaacctcggtcgtcatatctggtttattaactgctttaaccgctttttgtgcttgcggtaatttgtaacctaacgcttcaagcgctgaaacagcatcatcggcagcgttatttgccacaagtgtattattacttgctggctcaataaccgcattatcgctaaatggcgtaaataagtcattaccccaatttttaagtctgtctttcatttcaagcactaaacgctcagcggtttttttaccaactcccggtagtttaaccaaagtggtcgcatcttcattatttacacacgttacaaattgctgcgccgacattcccgataaaatggcaaggccaagtttagggccaacaccattggcttttaaaagctctctaaataaagcgcgttcggttttattgttaaaaccaaataatagctgggcatcttcacgtactacaaagtgggtataaataatcgcttgctcacccactgccggtaaatcataaaaacaggtcattggcatttgtacttcgtagcctacaccacttacttcaataagaatttctggtggctgtttttcaactagtaagccatttaatcgaccaatcatattacttccttaatcgtcctcttacggttttgctagcgctacccgcaagttttattaaattttgttctgagtgagcatgacaaatagcaatagccaaggcatcagcagcatcggcttgcggagtgcccggtaattttaatatatttttaaccatatgctgtacttgcgacttatcggcaccaccattacctacaactgcttgcttaatttgtcgtgccgaatactcataaactggcagctcagccattgaagcaccaacaattgctgcacctcgggcttggcctagtttaagtgccgagtctggattatgtgccataaacactttttcgatagcaaagctatctggagagaattgttctaccaactggctaataccttggtaaatcatttttaagcgcaccggaaaatcgtgatcggctaatttaatgcaaccacttcctaaataggtaaactttgcaccttgatgggcaatcacaccataccctgttaatcgtgaaccaggatcaattcctaaaataatcgccaactaactgacccgtctattatcattattatctgcagttaataatgccagagcactgtataaattaccagtaaccaattgcaattcataaaaaatgcccgcaattgcgagcatttttcacacagctttctcttatgccaacgagcgcaataagccttgagtatttttgcgcattgttctggctatcattaaataacccaaacatgccacaaataagccccctaccgcagggccaattaaccaaatatgcggatgcagtttacctgctaattcaaacatctgcctttgtactattaataatgcaacatcactaacaatggctgcgactaagcctgctgtgacccctaatagtaaaaactcatataaggtggcatttttaattaagcgccctttcgcgcctaaggttcgcaaaataactatctcttgcatacgctcgcctaaacttgcttgtacttgtgaaataagcactagagcaccacaggcaacaacaattgccaacacaaaccctatcgctaacgatacttgctctatggttgagcggatttgctttataaagctttcaacatcaatcacattaaccgttgggtactggcgcattagctcattaaactcgcgctttttatctgccttcacatttaccgatgaaatataagtagcagggaaactcgccaatacatcaggacttagaataataaagaagttcggctttaatgttgtccaattaaccttgcgcacactggtgattttggcatcaaacgattgtgcaccaatcaaaaaggttaatgtgtcgcctaatttaacatcgaggcgttcaagcatagactcttcaactgaagcttcagcgacagaatcttttgtgaaccatgtgccgtcaataagctcattttgacttggtaaatcttcacgccaagttaggtttagttcacgaccaataccggaacgagcttcttcatctttcttttcattgtcttcttgtgagacttcacgagctaccaactcgccattaacggcgtttacgcggccacggacaaccgggtaaaagtcagaggttggcatatttcgctctgctaaaaagctcgtaattggctctagttcttgctctgttatattcactaaaaatgaattgggcgcatcaaccggtaattgcgattgccagtcagagatcatgtcatttttaagtacaattaaaaacagcaacagtttgatagccaaagcaaaactaatcaattgcacagcattcacattggcgcgcttttggatagacgcaatcgccaaagaccagctattaccagggcttaaaccgagctttcgaccgccaccaaatataacctttgataaaccaaacaacacagcaattaaaaacgctgtagagagaaacaaaatagcgcttattttaatattattactaaataaccacatcagtaaaaacacggtaagtgcagacatagcaaggtgtattttactgaccaataaacgatcgcctaagttacgacgcagtactcgcagcggcggaatatcaaataaatcgagtaatggtttaatcgagaacataattgcacaaattaaacctgtgctaattgcaataatccacggtttagccgatgcactaggaagtactgagcccatgctttgtgctagataatctgttgcaatggcttgtaatccataaccaatcagcaaaccaacgatcaccgacattgaacaaacaaggctcaaatgaagtaaatatattttacggatcatagcgcggctaccgccgagtgttttcatcatggcaacagggtcgtattggcgttcacaatagcgctttgccgataccgcgatagccacagcagctaatataatgccaagtaagcctgccaataataagtagctttcggcgcggtttaagctattagaaataggcgattggcggtctttaacgccataccaacgctggttttctttcatttgaggttttaaccagctataaaaattttcgatatcgctttcgtccccagcatagagctggcggtaaaacactcgactacccggctgaataacctgagtttttgcaatatcgtcttcgttaattaaaatacgttggctactagaaaacacattaaacggtgcatcgggctcttcagctacaacatgactggcaacaaaagtggcggctcctaactctactttatcgccaactttaatattaagcgcatagaaaaccgactcactgagccaaacttcaccgcgagttggaatgtcttcagttacctgaggctcagcagttaagctagattttatctttagctcgccttttaatggataagtatttgataccgctttaaccgaacccaactgcatttcgtcaccagcaaatagcatggtatcgaaataggttatttttgcggtgcgaatgttatcttgggcggctttatctaaaaactcagcaggtaaagcatggttacttgctaagacacgatctgcagcaataaaggcactgcttttttgctcaatactttgaccgatacggtcagtaaccatagataaagttaaaacagtcagtacagctaaagctatggctgcactgatcactgttaactcaccgcgcttaaactcacgtgaaaacagttttagtgctaatttagcccacattcgcttgcactccttcgctttcttttactgttactaattgccctgcttcaatatgtaatatttgctggcatttttgcgcaagctgctcatcatgggttactaaaataagtgtcgtaccgtgttcttgattaagttcaaataataacgactcaatgagcttaccgtttttactatcaaggttggctgaaggttcatcggcaaataaaattttaggtgtaccaataaatgcacgagcaatcgctacacgttgctgctcaccgcccgacaattgagacgggtaatggccaacacgatgacttagccctactttttcaagtagctcaagtgcttgttgtttagcatttttgcttcctgcaagttctgccggtagcatcacgttttctagagctgttaaactttgcacgagcatgaaagattgaaatacaaatcccactttctctgcgcgaagtgcagcacgtgcttcctcatctaattcgtgtaatgcagcaccatctaaatgaatactgccattggttgattggtcaaggccggctaataaacttaataaagtagacttacccgaacctgatgtgcccactaccgcaaccgaatctcctgacttgacattaaagctgatgtcactgaggatggtgaggtcgccctcaaccgtggtgaccgttttagaaagtcctttaacttgaataatgtttaattgagaaagcgctgacatatgatgcatccaatcctacgttttatattcgttttactgttagtaatcaaaccacttacggcagcagctgacaacacaattttaattttaggtgacagtttaagcgccgcttatggccttaaacaagagcaaggctgggttaaattgttacaagataagtacgatgaaaaagaccaatcagtatacctagtaaacgccagtattagcggtgaaaccacaggcggtgcattaagacgactcgatgcattactaaccgagttcgaacctacgcacgtgcttatagagcttggcggaaatgacggtttacgcggttttccaatcaagcgcttacaagctaacctacgtgatttaatagcaaaaagccaacaaactggggcgaaaaccgccgtaatggaggtacaaattccgccaaattacggcccgcgttataccaagctttttaccgacagctttaaaaccattgccaatgaaacaaactcagaattaatgccattttttatgatcgatattgctggccgaccagagcttatgcaaaacgataacttacaccctaacgccgatgctcaaccattaatacgcgactttatgtacaaaacgatcaacgattggctagattaaccgctagcctaatcgctttataattagagctggacaataaacagccaaacaaaccgcaggtgtattgatttttataaaaaaagccgtactatggcttgcaacgtcggcatatagcgcagcttggtagcgcactgtcatggggtgtcaggggtcgcaggttcaaatcctgctatgccgaccatttttccccttacttatcataaagataagtaaataaatcttatatattagcaactgctaatttgtattattattttcagacacaaataatagatacccgtcaatcacattactttctttaatgtaatatttccaattacacctaaagtgctttaatcttaatttacttaattcttcgttctaaacactttataatcaattggttttcaaaatggtaatatagtatcaaggaaagattgtgaagagcattgaaacttttctagtatgtgtttgcctgatgcttgctggcggaattatcgttagtgcagtcggttctccattcgaaagtattattaatttagccggtagctttgggagccttgttggtggaggtagtgctttatgggctctctacatatggaagaaacaaatccattacaacaggaagcttgaagttatagagatagctttaaaggttcaatgtttagctgggagctttatgagaaaaactaaggaattatatctaatttctgaatgcggtattgccccctcaaaaccagacttaagataccatattcaaagatttaacgaagaatactgtacaggtagcaaccaactaaatttagcactaaatgaacttagagaaaaagctgctatgtatcaacgcctaactaaggataaagaggtgagtaatttagcaaatcaaatgattaacgctgtacatgatcttaaacgttttaaaatcccttacgatatgaacactgcaaatgaattgaggtaccaagctattgtactccaaactctcgttgataatgttatgtctgctagatcaaaatttgaaatgcatatagaaagtgaaaagcattaatttactctaacacatatacctctttcaaagctctaggacagagattttttacaatttcattgccatcaaacttagaagtaaatatttggaaatgtgatgctcgttgttgttggcgctgggctattatcatctaggtaaactctttcctcatcaagctcagcggttactgaaaccagatctgttgatgacggctttatatcctttatgagcactccattacaccaccgtgtagtgataccaaacatataaaatggtggttcgattgaaccatctagtacgggtgtaaaatctaaatcagcatcgataacaacttcattcgagtcactgctaggcgaagcgtgtaagggccagataaagtgccgtctggttttcttaaagcaacaacatgtgtttaccctgtttgccatttcagttcagggttatcaaggtagatagagcgactaacatgtcgaatacgtggagcactatcataaaggtgctagtaacaatgtatataatcgaaaacttggctttttggaactcgttttcgactatgcgaagaatagtggctatatgacggaaaacccagcagcgttaaaaattaaaaagccaaaagcaaagaaacaacgtagagctttagatcttgaagggttcataagtatccgcgataaagctccattatggttaagaacagctatggatttaacttatgcaaactacacatgctgttttagaagtgtcgaaaattgaatacaaactgaaaaaagccgaaccaggccgttgcggttgcatttggtataaacaaccaaagaaagatcaatttggtactgtttatggcgaattaactattcatcgccaaaaaactcataaaagtgaagcttcacacgtgattattcctataaacgactcgataaaagcaattatcgagaacagcagagatcgtgttttatctccttatgttgttcataaaataccaaagaaaaactctaatcctacgagttctcttgttaatcacgttactcaaatagtaagtaaaaatatcagtaaagagttttctaaaatacgtgatgagttaggtttatatgaccagctaaagtcagaggagcgccctacttatcatgaaatacgaggcctttcagcgcgtctaatcaaagctcaaggtaatgatcctcaaagccgtagggtcattcagatagtaaatctacaaaggtttacactgagtttggaaaagagactgagtgggtacaagtaccaaatctcactgttaacttctgagttttagagtaatctgataaaacccgctaaatagcgggtttttatttattagcaatatattaagctaagtgaagttttctattcgatagttaaaataaataaagcaaaatctaaattattttggataatttccttttatagccgaagcgaaacttacataaatagcgattttattgaacttaccactgaaactaactcggatacttggggtgttatgactgtaactttattccatagttcaaatattttacctttatctggttctggcttggtggcttcttccgctagtttattagctgcatggatggcttgaggctctttggactcttctacatagctaattaataaagcaagtgatttcattaactctgtatcaccttgaatgtttttcacttgagatgaaccactaatagagccgccatctaaagctagcatcgcgttatcgccagttatagtgatcttatgcccagctctttcttcagctttcttaagtattttttctgacatacttttactctcacttctatgtttaatagttgttacaatgtcattttcaaccttttcagattgcagttttactaaattgcttacaagaaatgctaaccaaacaagcatagaaaaagatagtgttttttgaacagcgccagctataccaacggagtccctaaaagcaattaataatgtgaatatctcgattaaaagctggataaatataataaaacctataaccgaaaagaatgttgaaaatttccgaaggttagatttgagctggacaaggtaatatccagaaaactcttccaaagagcgttgattttttgactttaagctattatttccttttgcactactctcagttgaggttggtaatgttaaaaaagctaaagcaatgaatattgcggatataaatgataatggagtagtccagtattgtatgtcggaaggcggagcaccacttgctattgatacttgtaaaattatcgtgcctattatgtcaagcccaaaaccgaagtaaccgaaaatcgctccacgatgttttctataacgaaaagctaatattcctataaatatccatgaaaacaatgttgaataaataataatagcgataacttcaaaattcatagtaaactccattttatacgtagtaactaagaaaacgagtagtgcccaaacaacgacgtgcgtaagagcatccaacctgatggctatcctgcctttgcttattaggctataaatatcgtcttaactcttgaactaatggtgttataacttgtttgtccgaccaatatttcccatgactccatggattccagctagagaaaatcccccccgcattaatttcatgatctttgactagttgttcataagaatcacttagtggggatagcggccaaccaagcacatcatctctatcaaagtagttatcccatttaaaactatcgtttggctttggaacggccactatcggattaagcccccctacaaacataggaatattgcatccagtagtaattaaattagtgcaacttttcaagcgtctgaaggatttctgatgttctgatgcattcggctccatgtctttaaacacccccaaaccatgagttgcgtcccacaaatagttagaaatcacttggcaaccaagcgactgagctataataattacaggtttgttatgatcttgaagatctaggtaggctttatctagggctttcattatttccaattgcacttttatatattgatcgctcacgctcgaccttgcactatattctagagaacctgcatcagagaaaccaaataagagaaatcgccttaaaattgaaccatccaaagggtatctattcattctttgccagatagcgttttgctgtttctgaagtattggctgatattgaacagcttcaaaggaaacttttgcccaatcatctcctagacttttggatagtttttcatgcagactatcataatagttgggtttgtagtcacccattccgtgcaacgtaattaaagctacttctttttccatattgtttctcctttgctgataataaatagccgctaacgcacacatttatgtagtacatttacacaattactgaagcacataccacaatgacgtagtaaaatgttagccatatagctgcttgtaaagcacactcatagcagcaattttcaatactcaaagtgctctaaggggaggttggtaagagctccatattaaattcattttctttattctgcgcttcataactgagtgagaacaccaacgttattccattcaacatttagaaaaagcattttgtgtccaaaaggctataccaaaaatttatgatagtagtttacgaagatattgctaacttcattttcgtaaatgagaaaattcacacatattttttccttttaaatgtgcttaacttagttaaaatccgcagcttaaattgttcaattttttatttatcaaccttagaccctatgctagttgagaaaatatttgatggctaataaagtggtgtcagcataaaaatacacgcattgtgtcattttcctgcacatgaggaagctctcccactcgatataaaacctgttttaatttaagcattttacgtccattgatgacttaaagaagagctttgagagtttataaaaataaaactttacaactctctcatttgaaactcagcacatggcttatgtaacctaatactcctagttacaaccccctctaaacaaaaatcatcctctggtgctacatacactggtttaaattcatctgaaactgataacaacaagcggttgtctttatcaatgatcttgcaaacaaaacatccattgtaacttgcaacaacaatatcaccgttgctcacatctaccgccctatcaactaaaagtaggtctccatcatatatacctactctctgcattgactgccctgatgccatgccgatgaaggtggcatcaggatgtttaattaaaagttgatctagcgaaaggccaagctctttgtactgagcagcaggcgattcaaaacctgtaataccagcttcgatatagattggaataacgaacataagaaataaaacaaatacagtacatataaacagcacagtgaaaatctgaaggatcctaaagtgaaatatgaaatgatttagctataggtttttacacttagtttctctaatgaattgtcttagtgactttaaaaggttttacgaaaaaaaagcatttgtgataggctctataactatctgttttatacggttataaaattcgcgaaagtactgaatttcaccctgcgaaaacccgtgcactagctttattttcttcaaatatcatactgttatatagttattgtggaatatcatggggtgtcaggggttacaggttcaaatcctgctatgccgaccatttttctaccccccaaactcccgctctattatttattcctctgtgctttaaactccttaaaaatactgttcacattcacttttgcgccaagctttgcagcgattaaaaacaggcctgctagttttctgtgaacgaacagagcatctacgggtggtgcgtgccaatgctctgaggcggtgctcatttttaggccgagctctttaatacgttttggtaagtcgctatttgcaaaatcataatcaccttggtgacgcagtggctcgcaggcgagtagaaatatatcaacgacattatctatatattcttgcgcaagcccttgttgaaaatagccaatttgctgtgctgctgttgcaacacctgctctatcgttagtattcgcggcagataataactgtaagtaaccagcactaatatgctgaggtagttcgcgggtggcgccaaagtctaaaagtactaagcgttgattgtcgacttgatattgatagttggcaaagtttggatctgtttgaactaatttaaagctaaatagctcctgtaaaaacaagcttagtaactgctgagcagctttattacgtatcgtttgctctgcagttgcaagtgcttctagctcttgtccttcaacaaaactcatgactaatacttgagaagagctcagcgaatctacaatattgggaatcaggtagttttcatcaccctttaaacactcgctgtagcgttttaaatacttggcttctaattcatagtctgcttcgtttataagttgttgtttggcttcgtctattagaggttgtatttctacctctttgggtaataagccactgagcttcaaaaggtaagctaagttatcaacatcactggcgatgccttttgcaatacctgggtattgcacttttactgctaacttttcgcccgattcacggtaggcaatatgtacttgccctattgatgccgcagcaaatggcctaagttcaaagtgtgataattgttctagccaagcatcgccccagtgctctcgcatcactttgactaattgcttttgcggcataggtgtcgcttctgcacgcagccttgctaaaattgcagatagctcaggagtgagtaattcgccactatccatggataacagctggcccaatttcattgcagccccgcgaagatttgcaagctgctctgcaaagcgctgaatattttttggctgtaacaataactcttgtcgtgatgtttgcttgccagccgcccatgcttttgtgccttcaaacagcatattacccgcgactttaccagctaatgagccaagccgagcagcgcgtgaaaaccgtgatgttggaacagacttttgtttattactcatattgcttcacactattaacttaatgctttaaatacgttgattgttcagctttagatccactttgagcttactatacccagccttttcgtcccaaaagcaaaaagccgcacggttagcttacttgcttcccaatgcggctatttatttaaaaacaactcaataaatcgttttagtgagtgttactgcttaccagacatcaactgttccatcagttggctaaagtcaaagctcgctgctttttgcagtggtggatattcagtcaatgacttaatatgttcaccaagtagatgttgcacaggctcatttagccattgcttagcttgcacaatgtctgaacggtctgttaagccatcaaagctttcaaacgggtccatacgtaagttatagatgatcgggaacttttgcttctcatactgagcgtaatagttttcgctcgtttcgaaatgaagtttccactgcttataacgcacagccttgatgcttgattcgtaataataaaggaaactatcacgcgcactttcgtctgttttacctaaccaataatctaagttatttacgccatcaatcggttgcttatgctctttaagggcttttttcgcgatatttggttcacccgctgctgctgcaagggttgtgtaaatatccatgtgcgattgaatacccgttagtatcgtatttgcagggactttacctggccaacgaacaatcataggaacgcgtacgccgccttcgtaagttgtcatcttttcaccacggaaaggtgttgtaccgccgtgtaatcgagcgctgtgctcaggaccattatctgttgagtaaataacgatagtgttatcaagtacacccatatcatctagcgcagccattaactcacccacttgctggtcatgttcaattaggccactgccgtataaatcatgctctgtggtgtactcttcagctaaataacgactttcgtcacttaaacgcgtatacatgtgcatacgacttgggttaaaccaaacaaagaaaggtttatcagctttttttgcacgcttgataaaatctaggctcgcagccataaactctttatctacgtttttcatacgttcgcgagaaagctggccggtatcttcaattttttgtttacctactttaccaaaacgtggatcaaccgttttatcatctacattagttgcgtaagtatgtaaaacacctcgcgtaccatactttttgaaaaattcagggtcttttggataatcacgttgctcgaattcttcttgcgtatttaagtgatataagtttccaaaaaattcatcaaaaccatggacggttggtaagtgctcgttgcgatcacctaagtggtttttaccaaattgacctgtagcgtaaccttgctctttaagaacttcagcaagggtataagagcccgcttttaaaccaagctctgcgcctggtctgccaacagttgtcatgccactacggattgggtactggccggtaataagggcagcgcgaccagcagtacatgatggttgtgcatagtgatcggtaaacattgcaccttcatgggcaagtttatcaatatttggggttttataacccattgtacctaggccatatgcactgacgttttgccagcctacatcatcggggaatattatgaggatattgggcttatctttagcaaaagcgacagagcttgctaaatacaaagcagcagatgctacggcgagtagttttttcataacagcagtccttcgtgtattgtaataaaatactatgtgatttagttttaaaactgatagtacctatttttagtttactaaacatactgcttaccgcaattaattattatcaaaaaataaaaaaaaccgcatggtttcccaatgcggcttcataaaatgactaaaaaattaagcctatttaattacttctaagccacccatgtatggacgtaatacttttggcacgataactgagccgtctgcttgttggtagttttctaagattgctacaagggtacgaccaaccgctaaacctgaaccgtttagtgtgtgaagtagctctggttttttctcgccttgacgacggaaacgcgcttgcatacgacgtgcttggaaatcaaccatgtttgaacatgatgagatttcgcgataggtgttttgtgcaggtaaccaaacttctaaatcgtaagtttttgctgcaccaaagcccatatcacctgtacataaaatcactttacggtatggcagctctaatgcttgtaagatttgctcagcgtgacctgttagctcttctagtgcttgcattgaatcttcaggttttactagttgtactaattcaactttgtcgaactggtgctgacgaataagaccacgggtatcacggccatagctacccgcttcactacggaaacatggtgtatgtgctgttaaacgaattggtaagtcgctttcgtcgtaaatttcgtcacgagcactgttagtaagcggcacttccgctgtaggaattaagctgaaacctggttgttgctgaccgtcgtcatctactaaacctaatgtgtggaataagtcaccagcaaacttaggtaattggcttgtgccgtataagcttgcgctatttactaggtaaggcacatacatttctgtatagccattttgctctgtgtgcgtatcaagcataaactgcgtaagagcacggtgcatacgtgcaacttgaccgcgcataacggtaaaacgtgcaccactgatcttaacgcccatttcaaagtctaggccgttaacatcttgaccaacatcaacgtgatcttttacttcaaagtcgtatgacttaggcgtaccccacgttgaaatctcaacgttttgatcttcgtcttcaccaacaggtactgattcatcaggtaagtttggaatagcaagtgcaatttgcttaagctcttctaacactgcatcttgctctgctttaacgctgtctagttggtcgccaagattactaactgaatcaagcagctgttgtgctttttcgtgctcgcctttcgcttttgcttggccgatagctttggaacttgcattacgctcgctttgaagttcttgcgtttttacttgtaatgttttgcgtttttcttcaagagcagtcactgctgcaatatcaagctcgaaaccacgcgttgctaaacgtgcagccgcttgttcaatatcttgacgtaaatatttagaatctaacatgttcgatttttaacctttttgcattaccagctgaaggcccagccaagccataaatatacacaccaccacgtttaaggtgatattgagggccattttaaaaaagtgaccttgttgcaatagcaacaacgaatccattgagaatgttgaaaaggtggtcaatgcacctaaaaagccaataccaattaaggttttagcggggctaacagcgattatttctttttcaatcaagccgtataaaatgcccattaacaatgaaccaagaatattaactgtcaacgtgccaaaagggaatcccctacccagcagttttagcatggtttcgctaagaaaatagcgtaaacatgctcccgatgcaccacctagcgcaatcatcatgtaaagtttcaaactattcataacgtttaatatcactttgctcgttgcgctgagttaaatagtccagcttttgtttgattttttgttcaagtccacgttcggttgggaagtaatactggcgatcattaattgcttcagggaagtacttttcgccagccgcaaatgcaccttcttcattgtgagcataacgatattcagcaccataacctaaatctttcattaaacttgttggtgcattgcgtaaatgctcaggcacaggataactcggctcatttttagcgtcttgcagcgcttgattaaacgccatatacacagcgttacttttcggagcactggctaaataaatggtggcttgtgcaatagcgcgctcaccttcacttgggccaacacgttgaaaaatatcccacgcattgagtgccacttccattgctcgcgggtcggcattgccaatatcttctgtggcaatcgctaataagcgcctagctacataaagtgggtcgccgccaccggctaaaatacggcaataccaatataaagcgccatcaggtgaacttcctcgtactgacttatggaacgctgaaatcaagtcgtaaaactcatcgccgcctttgtcatacttagctaagtgagttggcagtacttggcttaaaacatgttgatcaacaaggtatttgccctgttgctccgaggttaaatcaaccgcttgttctaacaagttaagtacttttcgcgcatcgccatcacttgcttggcaaagcgcctgtttagcgttatcggcaatttcaatgtgtttttggctaagctctacgtcttcacgcaaggcgcgctcaattacggtaaataaatcggcttgctctagtgcttttaaaacatacacacgggcacgagacaatatcgcgttattaagtgcaaatgatgggttttcggtggttgccccaacaaaaataaaggtgccatcttcgatatgtggtaagaatgcatcttgctgagatttattaaagcggtgcacttcgtctacaaataataaagtgcgttgtcctcgcccagcaaggtttgctttcgcttcgcttactgcctcacgaatatccttcacgcctgctgtaacagccgacatttgaataaggctggcatcggcatggttagcaataatttgcgctaaggtagttttaccaacgccaggcggcccccacaaaataaggctgtggcatcgtcctgcaagaatcgcttggtaaagaggtttgtcagggctcaataggtgctgctgacctatgtagtcattgagtgtttctggtcgcatgcgcgccgcgagtgggcgcacatcagggccaaaattaaatccgaggttactcaagccttaatcaccttggctttggtcgtcaacttccacgccctcaggaatggtaaattcaaatgtttgagctgcaagcgcttcgtttactttggcatctttaaaggtaaataaagattgctgacctgaggtgtctaatacagttagtgatgtaagaccttgctctttagcattaaagctaatatctaacttttcaacttggctctcaacgcctttgtttggcgtgacactaaagcctgcctctgttgccacaacttggtattttgcccactgctcaggatcttttgaggtcaacaatacaaacggtgttgaatcaattaggctgtgggtattcataatagttacttgttcagcaaagctgtcgaagtaataagttttgtcgccatttgatacaaacaaggtgtcatctgggctttgttgttgccagcggatcatcataggttgctgaagggcaatgttcccctcaccttgcatgatagcttcaccttgagaatcggtcacttgttgcgaaaactgtgctttaaaacttttaatcgcagccagttgttgttgcaacgcttcgctgtcgtctgcaaaactttgaccgcttaataaacaacccataattagggctaggtatttaatttttttcattaatttgctccaccatttggcactaagacttcgcgggcaccgttatgacccggtgcgctaacaatgcctgatgtttccatttgttcaactaatcgagctgcgcggttataacctacgcgaagcttacgctgtacactcgataccgacactttgccggtttcaattacaaatgatactgcttcatcgtaaagcggatctgactcttcatcaccgtcttcactggtttctccaggtagtaaaatttcttctgtggcatcaccacttaaaatttcatcaatataatttggtttgccgcgttttttccaatcatctacaaccgcgtgaacttcgtggtcgtcgacaaacgcgccatgtacacgcactggcacactggtacccggcggtaagtaaagcatgtcacccatacccagtaagttttcggcaccttgctgatctaaaatggtacgcgagtcaattttacttgaaacttggaacgccatacgcgttggaatattcgctttaattaaacctgtaataacgtcaaccgatgggcgctgtgttgctagcactaaatgaatacctgcagcacgagctttttgtgcaatacgagcaatcagctcttccacttttttacccacgatcatcatcatgtcggcaaattcgtctatcaccaccacaatacttggcaatttaccaagctcttcagggccatcggccatgccatctgtgtctttaaaaagtgggtctaaaatagggtgacccgcttctttcgcatcaagcactttttggttgtaaccttttaagttacgcaccccaagtgccgacattagcttataacgacgttccatttcgcctacacaccaacgcaatgcattggctgcttctttcatgtcggtaacaacttcacataataaatgtgggatgccttcgtacaccgaaagttcaagcattttcgggtcgatcatgatcatacgaacatcatcagggcccgatttgtacagtaagcttaatatcattacattaacgcccactgacttacctgaacctgtggtacctgcaacgagtaaatgcggcattttgccaaggtcagcacatactggctcaccagcaatgtctttgcctaacaccatggtgagtggtgatgggtttgattcgaacttaggcgcgttaataacttcacttaaacgcactatttcacggtgcttgttaggcagttctaaacctacataggttttacccggaataacctctacaacacgaacactcacagcagacagtgaacgcgctaaatctttagcaaggccagtgattttagctactttaatacccggcgctaaatcaagctcaaaacgcgttacaaccggacctgggtacacacccacaactgcagcttgaatgttaaaatcaagtaatttggtttcaactagacgcgagattccatcaagctcttcttgtgataaaggattttttgctttatctgggcggtctaataaatcaagtgatggtaacgggtttgtaggcggctgctcttcaagcagtgcttcaaacttttcctttgccgttggcggtggctcatatgcaggttttggtttaggcatagggcgcgcaggcgaaacaaccgttgtgaccggtttttctggctcaacaactgggctctgatcaagcgcattcagtgccgatacagtatcgaatgattcgtcatcaagcgcactaaagccaatttcttggtcaagaatatcgtcaagctcatcaaaaccttcaaattcatcatcactactgcttggctgttttttctgtgtttgtgatggctttgttgctggctcgtctatgtcatcgaaacctatagctgggttgctatcttgctgttcaaagttagcgtctggctcggctgacgttggtttaaccgcttctctttcgcgatttaaccatgcagaaaactgcgcgcgtaagaagtagaatattttcatcacccacttaccaacaaagtcaacaaactgaacccaagaaactccagttagtagcgttaggccggcaaaaaagaaacacaacaataaaatagaggtgccagtgaaattaaaagttggcatcatggctgtggcaatcacatcacctactaccccgcccgatgaaaaattatatatatcatcaaaattgatgctactaattgccgtggctgaggtaatgaataatgcaaagccaatgactcttagagcaagcgtggtgtagtcaagctgtaaaatacgatgaggttgtttaaacagtaaatagccaaacagctgaatggctaccggcacaagataagctagccagccaaaactaagcaaaaggatatccgcaatccatgcacctgcggtgccggtaatattcttaacattaacaaattcaccggtttgcgaccaagaaggatcggctggatcaaaactgattaatgcacataaaataaatactgctgcaaaggtactaataattagccccgtttctaacagtctttgaacaccatttaggcgcatagctccctattccttattattctttactcatcgattagcagtgaaataccttagcaggaaatgccgtttgatgcactttatcttaaccttgatggactgataatgaacaagtttttgttactcaatgtgtattttaacagtttaggcaatatatgggcgaataatgaccccttgctcaccttttacttcttccattaccacataggttcggctttcactgacattaggtagttttagtagaatatcccctaaaacatttcgatattccgacatgtcgtttacccgcgtttttaatagaaagtcgaaattacctgatactaaatggcattcaataatttcatcgtgctttttaactgcagcgttaaattcttcaaatacatcgggtgatgttttagtgatagtcacttctacataaaccgacaaaccttgcccgagttttgcaggatctaccacggctttataaccgagtatgtacccttccctttcgagcttttttacccgctctaaacagggtgttgcacttaggcctacacgccttgccagctctacgttagagatccgaccatcgagctgtaattccattaaaattttacggtcaattcggtcgagtaattggtgcataagacaaaccagagttttaaactgttaaaattaattttttagattatatcactagaatctaacttaaaaaaggtgagacacactggcatgtcatgaatataatagtcaaaaattttatcccgttctattaaggcgaaaaactatgattattggtgtacctaaagaaattaaaaaccatgaataccgtgtaggtatggttcctgcgagtgttcgtgaactagtaaaccatggccaccaagtgtttgttgaaactgatgcaggtatgggcattggcttcactaacgaagattatgttgcagctggtgctgaaattttaccaaccgctgctgacgtttttgctaaagctgaaatgatcgttaaagtaaaagagcctcaagctgttgagcgtgcaatgttacgcgaagaccaaattctatttacttaccttcacttagcaccggatcttccacaaactgaagacctagttaaaagcggcgcaatctgtatcgcttacgaaactgtaactgacgctcgtggcggtttacctcttcttgctcctatgagtgaagttgctggtcgtatgtctatccaagctggtgcacaagcgcttgaaaaatcaaaccacggccgtggtatgttactgggcggtgtacctggtgttgagccagctaaagttgttgttatcggtggcggcatggttggtcgtagcgcagcgcaaatggcagttggcctaggtgctgatgttgttgttcttgaccgtaacatcgacgtattacgtgcattagacgcacagttcggtaacaaagttaaagctatttactctactgctgatgcgttagaaaaacacgtactagaagctgaccttgtgatcggtggcgtactaatcccaggtgcagcagcgcctaaactagtgacagctgagcacatcaaagcaatgaagcctggttctgctatcgttgacgttgcaatcgaccaaggtggttgtatcgctacttctaaagcaacaactcacgcagatcctacttacatcgttgatgacgttgttcactactgtgttgctaacatgccaggtgctgtaccacgtacttctacgtttgcacttaacaacgcaacattaccgtatatcatcaaccttgctaacaaaggctataagaaagcgcttcttgatgatgcacatttcttaaaaggcttaaacgtgatcaaaggccaagttacttataaagaagtagctgaagctttcaacatggaatatgttgacccacgtacagcggttgaaaatgcttaattagcattgtgaaacaaaaaaagcagcgaatcgctgctttttttatgcctgtttgcaaataaatcagtttatctgcaaataatgatattgctgattaacgacgcttagtttgtttagcgcgttgattgtgctttttaaccgccttacggatttggttaattttagcacgcttgtctttacgtttttcaggaatagccgacaacttagtttgtgtttcgcgacctaactgtactgttttacgtaaatagttaacggtatctaaatcaagctcagcccaaccaccttgtggtaaacgcttatcaagctctaacttaccgtagcgaatacgaataagacgagaaacttctacatcttgcgattgccataaacgacgtacttcgcggttacgtccctcagtcaacgtaacattaaaccaacgattgataccttcaccaccaagcggtttaatatttaaaaattttgctggaccatcttcaagttcaacacctttggttaatgttcgtaaagtctcgtttgttacttccccaaacactcgcgctgagtattcacgctcaacttcgtaacttgggtgcattaaacggttagcaagttcaccatcgttagtaaaaagcattaaacctgcagtgttgatatctaatcgacccaccgcaatccaacgttcgccatcaacgcgtggtaaacggtcaaatacggtacgacgaccttctgggtctttacgtgtacataactcaccttcgggtttgttatacataagtacacgacaaatacgctcagctttgtcttcaattttcacaacgtgaccatcaacacggattacatcgcttgcctctacacggtcacctaaacgggcaactttaccgttaacacttacgcggttggcatcaatgtatttttccatttcacgacgtgaacccacaccagcacgggctaatactttttgtaacttttcagtttctaaattactcattcagatagttctctcacagaaggatcgctcaataactggttgattttactttcctgaagctcaggcagtggtggtaattcatctaaaccagctaatgaaaaatagtctaagaaagcagcagtggtggcgtacaaggcaggacgccccggcacttctttgtggccaacaactcttatccactctctttctaataatgttttaattatccctgagccaactgtaaccccccgtacttgttcaatctcaccacgggttatgggttgtctataggcaatcaaggataaagtttctaatagtgctcttgagtatttcggtgctcgctcttgccataagtttgcaagccaaggtgctaaacttgcacatgcttgaaaccgataaccgctgccaacggcaacaagcttaatgcctcgagtttgataatgcgtttgaatttggtcaattgcattatttatgcgtggcatagatacgcttaaatcagctaatactgtctcttttaaatgacgcttagacacgggcttcccggcaacaaaaatcgcggcttctatgatttcgactaattgttcatcactgatacgttttgcggccattgctactaaaggtcatttttactcactaacgctctattatgacagaagtcgaccaaggttggaaaaattattataaaaaagccagcgtaaaacactggctttaggggtatttaatagctgctttataaaattagctcttgttaagcatctctaacgcgtcgtcttcggcaacttcactgccatatttattaatgtaactaataaactcattgcggcttacacgtttatctttgttgctatccatatagccaaagtgatttgcaatgtcgtcgtcatccgcttcttcaatagaaatatagccatttttatcgttatctaacgatttaaagtcattttcgattgggtcaaatttagcgatttcagctttaaatgctgattcagatacctcactatcagttgccaccttacctgtatttaactgcatgtaagcattaaattcagtacggctgatttgctcatccatattggtatcgatatttgaaaagtgctcccaaatagcatcgtcgtcagcttctactttagagatataaccgtcgttgtcattatctaggctgccaaaatcgctgtcgattttttgctaaagagttactcgcagaacaggctgataggcttaatgctgctaaaattgttgatgctaaagttaactttttcataagacatttccttgtagtcgattagattcacttcgactgttacaagttgaatgccaaaatgccttattggctaaaatcaagcacttacaacctagttaagttaaggttaagcctatgatttagcaagcttttcattaattactgtaattttttcataaaaagcgctctaaagagcgctttttcaatctaactataatgttgctattagatagctgcgttttggtaacgcttaacgaaatctgttactgcttcgccattacattttaaagtatttaagttaccaattttttcacgcacaggtgttaaaccttttttaagtgcagtgatacaaagttgagtctccttttgctcatttttagcaaacacttcaacagctgcctttgttgcagcttcttgtgattgtgcttttttagcaatttcacggatgtcagtaccgttacataaaatgctctttgaaaaacgtgacattgaaatgccatgctttgctgcttctttacgtgcagcggtaaacccttcgttcgcacttaagctacataactttgattcaatacggttatcagctgaaaagtagtgcgggttgcttgctaatgagccaaatgagatacatgcaagagaaagcatcactaattgttttttcatggtttacctttaaatagtacataatatgaacgggtgatttgtgcgcattatataaccaaaaataagtagatcaactgaattatttatttaatttaattattaatactgagttaacaatgtttttaaaataagcagcaattgatcaacatttattcaatttgattttcgtaatttgctcatgaataagccctattttgatgatagaattgcgctaaacgaataaacaaaaattcagataggtaatccatgaaggtaatctcatttaacattaacggcctgcgcgcccgtttacaccagttgcaagcggtgattgataaacatcaaccagatatcattggcttacaagaaatcaaagtgcatgatgaagccttcccgcttgaggatgtacaaaaaatgggttatcacgtttatttccatggtcaaaaagcgcattacggcgtggcaatgctatgtaagcaggaacctaaatcggttgtaaaaggttttgcaaccgatacagatgaatcacagcgtcgaatgatcagcgtaacagtgactcaagaaaatggtcgcgatcttactgtaatgaatggctatttcccacaaggcgataatattgcccatgaaaccaagttcccatataagcgtcaattctataaagatttaatgactcacttagatgataatcacacaccagagcaagatgttattgtgatgggcgatattaatatttcaccaaccgatctcgacattggtattggagagcctaaccgtaaacgctggttaaaaacgggtaaatgttcttttcaaccagaagagcgtgaatggctaagcacgttattaaactggggctttaaagataccttccgtgaactatacccagaaaaaaccgaacaatattcgtggtttgattaccgctcaaaaggttttgatgacaaccgtggtttacgtattgatgtgattttagcaaccccagcacttgctgagcgttgtgttgagtcaggtatcgattacgaattacgtggtatcgaaaaaccatctgatcatgcgccaatttggtcaacatttaacgcatgatagagacgatgcaatggcagctccctttatggagctgtgtggctttagtactttggctaagctttgataagcaaagcgcatcccaattattggcaacaccaataagacaagtgggtgtgctcgcgtgtgctttagtacttgcaatattatggcgcattaaagcgggaatattgccgggcctcgaattgcatatcttaggggtcaccgcagtgaccctgattttaggttggcgactggctatttttgcaagcagccttgcaagtctactgctggtgttagtcgctcagttaccactgcccttattgcctgtgcatttactgtttacggcatttatacctatcacgctgagttacttgtgttttgtactttgctatagctatttaccaagacacttttttatttatatctttttatgcgcatttttaaccgcggctgttatcgcttgtatcaaaatacttaccagtggtgtgttttattacttattgggtgattacagttttattgagatttcagaaaactatctcattctatgtgccataatttggtttcctgaagcaatgctcaatggcatggctattaccttgttgatcacctatcgcccgcactgggttaaaaccttttatgataaggactatttagactcatgagtcttcactatcactgcccgctttgcaaacttgaacttacgctaaccgataaaacttaccgctgtgacaacaaccatagttttgatatcgctaaagagggttatgtcaatttactacccgtgcaaaataaaaagtcgaaacaaccgggtgataaccttgaaatggtgcaagcacgccgagcttttttaagtgcggggcactacctttttttacagcaagctttagctgagttagtggcatcacttaaaccaaatacagtaattgatttaggatgtggcgaaggcttttatacccaagcaatagcagcgcaatcgagtgccgaagtatatggtgttgatatttcgaagccggcggtaaaatacgcggctaagcgttatgaaaatgcaaattttagtgttgcctcgattagccaagccccttttgctgacgcatctgccgatgtgcttgtcagtgtgtttgcccccttatttgcacaagaacttgctcgacttgccaaatcgcaaagcagtctaattgtcgcaagcccaggaccttggcatcttaaagaattaaaagcgtttatttatgcggatgtaaaaccacatacagagatagagccaccagcaggatttagtaaagagtcaataaacttactagagcaacaggtgctattgcctgttgatgagattaaacatttaattatgatgacgccgtttgcttggaagtttcgcccagagcattggcagcagatagagcaacaaggcccacaaaaagtaacgttatcgttttatgtgagccagtttattcgtgattaaaagtgttcttttgtgaacgctttatccatcttttcgaacatatcttttaaaagttgagctaaatctgtgtagcatggtttttcagttgtaagttgtgactgatagccatgtgccttcattttactatgcagctcggtataccaacttaacattgctggttctaaacgagtttgagcgcgacgacctaaccacagtaagccttgaaaaggtaacgacagaaaaaataaagcgatagtaatagcttgagggaagtaatcactacctaaatagtttacttgcatgaacactgtgaacatagccagaataggcatgactgtgatcgccaagtcagtggctttgatcactctgaattcagcaaacattggagctagctcttgtcgcattggccattttttcgcgtactgacgacctgtttgcacttgtgacatgacacctttttgcatcatcactcctcgggttttcatactgtttcacaactgagtgtaacacactcccggatacaatccctgcaaaacctgtcctcgtttttataacaatttatgtcattgacactaacgttaatagtctaaatgagataaaatgttatcggcttaagtcaacgagactttagtataattacagcccacctttgttaagtgtagcaacaaaatacttatttactatactggcaaagaattctaattatcaagccttaatatacactgactgatatcgtacttttaggacctagctatgccaacgcccctttacccaccacaccatgttttagtactgaactgtggtagttcaagtttaaaatttgccattttagatgccaccacttctgacgaagttatttcaggtttagctgagcgccttggctcagacacgccttcaatcaaatataaatataatggtgaaaaaaagctgattgaacttgctaaaggtcaagcccacgatgcggcgattgctgaattggttaagctagtcaataacttaggtcttgcagataatttaatcgctgtaggtcatcgtgtggtgcacggtggcgagcatttcaccgaatctgtacttatcgacgatgatgtacttgcagctattgaaaaaacagcggcacttgcaccacttcataacccagcaaacttattgggtattcgcactgcaaagcaagcgttctcagcgctgccacaaattgccgtgtttgatactgcgtttcaccaaaccatgccaaatattgcttacttatatgctttgccttactcgctttataaagagcatggcgtaagacgctatggttttcatggtaccagtcattattacgttgctggtgaagcagcaaaattattaggcaaagagcgcgagcaaactaatgtgatcagtgcacatttaggtaatggttgttcagtgtgtgcgattaaagatggcaagagcgtagataccagtatgggtcttacgccgcttgaaggcttagtgatgggtactcgcagtggtagcatcgatccgggtttattcacctttttaacgcagcaacttaattacacggctcaagaaattgatgatttactcaataagcaaagtggcttgctaggtattagtgaattatcaaatgactgccgcactatcgaagaagccgccgttgaaggccacccgcaagcaaaccttgcactcgatatcttctgttaccgcttagctaaacaaatagctgcttttttagttcctctacaacgtttagatgcacttatttttaccggcggtatcggtgaaaactcagatattattcgtgacaaagtcatcactcaattaggctttttaggccttgagtgtgatgaagatgcaaacttagcggcacgttttggtaaagaaggtctaatttcaaaaggtcaagcgcatgcgaaagcgtttgttatccctaccaacgaagaatgggtgattgctaacgatgctgcccgtattgcacaggaggcttaagtaaatggcacatagaattatgttgatccctatttcaacgggggttggtttaacgtctgtttctgttggtttagtccgcgcgcttgagcaaaaagcgctaaaggttaacttttttaagccaatcgcacagcctcgttctggcgatacaggcccagaaaagtcaacgcaaattgtcacccatggttcgccaattaatccacctacaccatttgagctcagctatgcagagcaaatgattggtgatggtaaaggcgacgacttactagaagaaatcgtagagcgctttgaaagcactattaaagaagacgaaattgctattatcgaaggtatggtgccaacacgtcgtcagccgtatgctggccgtgtaaaccgtgaaatcgcgcaaacattaggtgctgatattgtatttgtattaacaccaagcaacgatagcaatgaccaaattgaagaccgtttagaaatcgcctcaggcaactatggcggtgttaaccaccctcgcgtgctaggttgtattttcaacaaagtaaatgctcctttagatgacgaaggtcgcgcacgtgcagaccttgttgaggcccatgagcctgagcaacttgaaaacgaattaaaccgtttagcatcactgccgattttcagaaagcacccatttaagttattaggttcaattccttgggatttcgacctagtagcgccgcgtgtgcgcgatttatgtgaatacttaaaagccgaagtcattaacgaaggcgacatggctcaccgtcgtttacgtcgtgtcactttctgtgcgcgaacggtttcaaacattttaagccactttaccccgggtgcattactggtaacaccaggcgatcgctctgatgtattagttgcggcttgtttatcagccatgaatggcaccaagcttggggcgattttattaaccggtggctttaagcctgaagaccgcattatgaaattgtgcgagcaagccatggatacaggcctgccaattcttgcaacagaggaagatacttggcgcacgtcactcttgctgcataacttcaatatggaagtaccatgtgatgatgaccaacgtattgataaggtgaaagatcataacgccagccatatcgactctgattggttagacagccttgcgaaaagtgttggccgtactcgtaaaatgtcaccgcctgcgtttcgtttcttactaacagacaaagctcgtcaagcgaataaaaccgtagttttacctgaaggtaatgagccgcgtacgattaaagctgcggcaatttgtggccaacgtggtattgctaaaacaatcctgcttggtgacaaagaagagattttacgtattgcagagcaacaaggtgtagagctcaacgataacgttacaattattgaaccaagtgatgtaattaacgattacgttgcgcctatggtcgaaattcgtaaaaacaaaggcttaactgaagttattgcccaagagcaactactcgacaatgtggtacttggtaccatgatgcttgagcaaggtaaagttgatggcttagtttcgggcgctgttaacaccactgcaaacaccattcgcccaccgttacagttaattaaaactgcaccgggctcgtcgttagtctcatcggtattctttatgctgttacctgatcaagtactggtttatggtgactgtgcaattaacccagacccaaccgcagagcagctagccgatattgcaattcaatcagcagactcagccgccgcgtttggtattgagcctcgtgttgcaatgatcagctacagtacgggtacttcgggttcaggtgctgacgtagaaaaagtacgtgaagccactaagcttgcccagcaaaagcgccctgatttagtgattgatggcccacttcagtacgacgctgcaattatggaaaacgttgcgattaagaaagctcctggcagccctgtagcaggtaaagcgacggtgttcgtattcccagatttaaataccggtaatacaacctataaagccgtgcaacgtagtgctgacttaattagtattggcccaatgctgcaaggtatgcgtaagccagtaaatgacttgagccgtggtgcattagtagacgatattgtttacaccattgcccttacggcgattcaagctaagcaagttgaaagcttagaaaattaacccttcaaaaattaggctaatttataaattctttataaattagcctattaccttctttatactgagctattcccatatttatccacagaatctgtggacaatatttaaaggctaaactgagcaaatccccagcaatcaaaattattgcgctttatcttaactttgtttacctatactataaattcaaaggcttcaaagataggatcacagatgtcaaaacaaacgttacaacttcatagtgaagaacttaccattcatagtttagatgttgatgcaacgattgatcctgccctactccaacaagctattttctttattgctaaaaccgccgatgagctatcaattgtatgcccaagttccttttcaatagacagtttagatcaagaaactgattggctagcacttgaagtgattggccctcttggcttttctttaacgggtattatggcgaacatttccggtgtgcttgctaaagcgtcaatttcgatttttgctttatcaacgtacgataccgattatgtcttggtgaaaaagcaaagcatggcaaaagccattacagcacttagaaaagacggttaccatgtgataggtgacgttaaataagccatgagtatcgacgttcaatatttgcctgagcgcagcctaagaaaagcgcgttgtatggcaatcaaaagcccttttacaggtcgtgttaaaagtatggctgaacacccagagcctttttttaggtatgccaccgttggtcctgggatttgtgtagaactaacgagccacaatattattgcccctttcgatggcacactattacaagttaaaaatgcaggaaaagaatatattttacaggccaaaaatggtttgaaaatattattaaatttatcgttttcatctatagaagagcatattagccacaccaacattgctaagctaaatggcagtaaaattagccaaggtgagcgattagcctattttgacctacgcgagctaagcagccctatgctaggcacagtttgcgtgctcaacagccataatcttggccccctttattattcactatctcaggtcattgctggggtagatactttactcactgtaactaaaaagtagaatttatgactatcatgtatggtatcagcaattgcgatacaattaaaaaagcgaaaaaatatttatctgataataatcaagagtttactttccatgattaccgtaaagacggcatcagtgcagagttagttaatgaatttgcagcgcatattgattggcaagatttagttaataaacgcggcacaacttatcgccagttatctgatgaacaaaaacaaaatctcgataaagaatcagcattagcattattagttgagcaacccgcgatgatcaagcgcccgctacttgtgcataatggccaataccacttaggttttaaagctgctcaatacgatgagatttttgcctaatgactcaccctgttattgaacttgctcaagcgcttatccagcgtgaatcagtgacccctgaagatgctggttgccaagcgttaatgaacgagcgccttgaaaaacttggctttaatattgaatcactgtttttcaccgatacgctaaatacctgggctcgcaaaggaaacacatcaccgcatttttgttttgctggtcacacagatgttgtaccaacaggtcctgaaaaaaattggcagcacccgcctttttcggcactggtaaaagacggcatgctacacggacgcggtgcagccgatatgaaaggctccttagcagctatggttgttgccactgagcgctttattgcaaaacacccagatcataaagggtctatttcatttttaattacatcagatgaagaaggcccgtttatcaacggtacaacccgtgttatcgatacccttgaagcccgtggtgagaagattgatttatgcttagttggcgaaccatcgtcgcgagataaactgggtgatgtagtaaaaaatggtcgtcgcggctcattaacaggctttttaacggttaaaggtgtacaaggtcacgttgcttatccacatttagcccaaaacccaattcacttagctgcaccggcgttaactgaacttagccaaaccgagtgggatcagggtaacgagtttttccctgcaacaagctttcaagtttcaaatataaatggtggcaccggagctggcaatgtgatcccaggcgagctcgacattcaattcaactttcgctttagtaccgaagtaacctatcaacagctacaacaaagagttgttgatattgttgaaaaacataaccttgattatgaactaagttggattgttaatggactaccgtttttaaccgatcacggtccgttagttgatgctacagtacacgctattaagcaggtaaccggacgcgacacggcgcttgaaaccaccggtggtacatctgatggtcgttttattgcgcaaacaggtgccaaagtcatcgagctgggccctcgtaatgaaaccattcataaagtaaacgaatgtgttagcacagatgatttaattcagcttgcagatatttatgaaatcattttagagcaactgcttacatgaaccaaaccgagcttaaacaatgcgccacagggttaagtagctcacatttagttgggctacaaaaccaccgcttgcatggtgatattgtcgatgactttttagcccttcaacaaggcgcgaaagaatcaggtattgatttggcgatagcctcaagctttcgcgattttcatcgtcaaagtgctatttggaatgctaaatttctgggtcttcgcccagtttatactcttgagcaaaaaacggtagacttacaacgtttaactaatactgaaaagtgtcacgcgattatgctttactctgcactaccgggggcaagcaggcatcactttggtaccgacctcgacatctacgatacccgccctattgacgatgattatcaactgcaattaacacctgaagagtattcgaccacaggaccatttactaagcttgctgtatggcttgataataaccttgaaaagtatggtttttatcgcccctatcaagaatataaaggcggggttgcccctgagccttggcatattagccatatcagtgcttcagcaaagatgatgcagtatttgtcagttgaaacattacagcaatgtattgaacaaagtgagcttagcggcaaacaagcgattttagctgaacttaacacgctttatgaacgctacgtattaaatatcaatgaccctaaatctaaagactgcgctttttagccattaaaaacaccaaaacagcgccaagaattaaggcgctggctattattaaacgcgttgtcagttgctcatctaaaaatagcacccccgctattgtagcaagcactgggactgttagttgtaccacacccgcttggctactttttagttttggtagtgcaacataccaaatactgtaaccgattcctgatgcaagtgctcctgaggctatagctaagcaaatcccggaagctgagactgcttgccaatcaaaagcagctacaagtactaaaatcggcacaagtattaaacttcttaaaaagttaaaactagttgcttgcagcggtgatctgcatgattttccacgaatgctgtaaattccccacgctacgccacttattgccataagcatagcgggtaaaaaagagggcactgttgcagagggcagcattaaatagataaagccagcaaaggctacaaacaacgccccccactgcactttactaagcggctctttgttaaaaacactatggcctatcatagtcagttgcaccgcagaaaataaaataagtgcgcccgtgccggtatttaaatcaacgtaggcaactgaaaagcagagcgcgtaaacaaataaactaagcgcactaatattgttacctttatcggttaaaggcttagctctttgcgattttaattgccactgcaacagtataagcagcatcaatgccccacttaccaagcgtaaggcagtgaaacttaatgggtcaatatcaccactttgtaatgccatacgacacagcaaggagttagctgaaaacgcacacagtgcaattaaagtatagagtactgtacttaacaaatgtggtgttcctttaacataaaaaaacactagaccagtaagttgtctattaacttacgattttttacataatttatcatagaaggttaagccgcgtatgctaatctgagtacattgtttaaaaggagtgttcagtgcatcgacgtttatttattggcgctgttttactgttatcaggctgcagtaccataggtattactgatctattccaagattatgcgacgcagctaagacctgtgcgccaagctgtatctcaaaataatatagaaaatgcgcagcaattgttgccgagcaatagccgtggccacagtaactatttattgaatcagcttgaaactgctcgtcttgaatttttagcgaaacagaattctcaggccaatgagacctttgaaactgtttatcaaaacatggaaaaaaagcgtcaagcagccaaaatacaactaagcacaagtcttgaacaaacaaattcattattaacaaatgattcagtgattggttatgagcctgctgcctatgaaatgaccatgttacatagctacaaagcacttagctacgtatttgataaccaacttgaatcagcattagttgaagttagacgcgcaaataaagtgcaagaagatgcattaaaagacaaccaagctgtacttgatgaacaagcagaaaatgcagctgagggttatcccgatatggccgagttaattggcaatgttaaaaatggttttcaaaatgcctttactttctatttgtcgggcctgctttatgaggcggataaacagtttgatgatgcctatatcgactataaaaaagcgctcgaaataaatagcgataatagctacctacaacaaactgttttacgacttgctaaaaaacaaggctttgagcaagactttgaagaatttagtaaacgctttggtgaacttaagcagcataagccaaatacgggccaagtaattgtaattgcagagcaaggtttaataccagcaagacaagagtttcaattacgcttgcctatttattcgtcccatggagatgcgcgtttttatagtatcgctatgcctgtataccgcggcgcaccttatgcaaataacgacaagaacattacattggatggcgacaacttcatccttaaaccaatcgttaggctcgaggcactagcagcgaaaacacttaaagatcaaagtaccggaagaattaccagacaaataatgcgcttggttgcaaaagaaaagatgcgtgctgaactggcaagaagcggcggcgatgtgggtaatattttagccaatatatataacatggcctctgaacaagcagatacaagaagttggcttaccttaccaagtcaattaagtattgcccaaaataccatgacaactggtgaacatgttttatctgtaccaggtcgtggcgaaataaacttttcggttagtaagcaagggttaaccttaattttcctaacctctattaatagctactatgacacacatgtcgttcaactttaggagcaatgatgaaatatttagtgccactattaaccattatacttgttgcggcctgctcctcacgcccgaccacttctggcattggtgttgagcaaactgcaaaacaatataaccaacaattgatcgttaataacccagaactagggcaaaaacttgcaattacagatgtaaaaacacgccaaacaaacggcttaacagatgtggttgtgacattggcaagccaatataaaaaatcacagtatttacagtaccaatttacttggtatgacgctgatggttttgttatacgcggcaatcactctccttggcaacccattaccttatttggatttgctaaaacacagttaccgggcttagccccgacagccaatgctgtcaccttctcgcttgcagtgcgtgaagtgtcaacagaagcacaagaatttgaagattaaggaaaccatgatgaaattactttctgttaaatcggctgcggccattgcgataactagcactttgctgctttctggttgtgccaataaagcggtggttagctacggcgatgctcaggctgttgaaacaactgatatcaactttggatcaaccgatctacaaaaagtagcaagccaaatgacagactcgttacttgcttcacctgtggttggcacaatgacagcaaatagtcgcccagtcgtgtttgtagagcgtattaaaaataaaaccagtgaacacattgataccgaatcaatcaccgattcaatctcaacacaattactacgcagtggtaagtttcgctttgttgatatgacacgcgttgaagcggtacgtgagcaacttaattttcaaaacgatgaccctctagttaacccaagtacagcgattgcatttggtcaacaagttggggctcagtacatgttatacggcaacttatcgagcattgttaagtcaaatgctgataaggctgatgtgtattacaaatttactatgcgtttaatggatttaaaaagtggcctagttgaatgggctgatgaaactgaaatccgtaaaacacgcgagaaatcaacttttggctggtagtcaggaggatgtatgaaatacttagtaacaatcctggtaagctgtttattaatcagctcgcctagttacgctgattatcagcgtaataaagcagtgccagtacagcaggtgttatttggatctgtgcaatcggtacgaacgattactgatcaagagctagttagagacaaaactaatggctgggaaacctttggcggtgcattactcgggggtgttattggtaatcagtttggcggcggcagtggtcgtaccgtcgcaaccattttaggttcaatgattggtggctctgttgctcacaaccgtcaacaaaacagtcgcgttatacaatatcaactcgttgaattaatgataaaagtagaaagcggtgaacaatacatggttgttcaagataaagacaaccagatgctgtttaatcaaggcgataaagttcgccttgtgtacctcaccgataacacggtgcgtgttgataaagcttattaaaaaagcgagcctcggctcgctttttttagctttgtcgataatcagcgaagaatcgctgcattttactcatcgcttctgttaaatcatctttgtttggtaagaacaccaatctgaaatgatcaggatctggccaattaaaagcacgaccatgcacaagtaagattttctcggctttgagtaaatctaaaatcatgcgttcatcgtctttaatattaaagtgcgccgtatctactttcgcaaatgcgtagagtgcccccttaggctttttacagctaatgccatcaatagcattcaatccacgccaagctatgtcgcgttgcacatacaagcgaccaccagggttaatcaaattgtcaattgactgcacaccacctaaggcttgctgaatagcatattgtgccggtacattggcacataaacgcattgatgccagcatatccaagccacggcttaaatcgtccatcatgctagtgcggccgcttaacaccatccaccccattcgcaaacctgctgcgcggtatgttttagctaaaccattaaaggtgataattggcacgtcatcgcataaggctccaattgagctgtgagttgcaccatcgtataaaatcttctcgtaaatttcatcgctcaataacagcaacttatgttcgcgagcaatggtaataagctccataagcaagtcatcgctgtaaactgcacctgttgggttatttgggttaataagtaccaaagcttttgttttcgatgtgattttactttttatatcagcaatatcaggaaaccaatcctgctcttcatcacataagtaatgcactgggttaccgccagccaacttaactgatgcagtccataatggataatcaggtgcagggatcaagacctcatcgtcattatcgagtaatgcttgtgtggtcatttgaattaattcacttaccccattgccaatataaatattatcgacatcaagattgtgtaagccacgctgctgatagtgttgatagacagccacacgggctgagtagaggcctttagagtcacagtagccttgggctgaatataaattacggatgatatctttatgcatatcttcaggcatatcaaagccaaaggcggcaggattaccgatatttaactttaatactttttggccttcatcttccatttttcgagcttgtgcaagcacaggcccacggatgtcataacagacaccgtctagtttgtgactcttttttatttgtgacatggttacctctactaatgagcctttagactaccccagtaaagggccaccatgctagtggatttttgaagttacaactgaaataaattcaagtttttaacggccagtaaaccaagcctgtaatttttcaactgaacctataacttgctcatctaaatagccagctttttgctcagccgttgcgaaatcactttcgtttaaagcatgttcaatcgcttgagcaacttctgacaaactttgcgcgccaaattgtgccgcatttgactttaagctatgtgcatggcgtgctgcagcttctgtatcggtgcctatattagctaacacctctgaacctagtcgctgaaactcactacaacaaaagctcaaggtatctgcaaactgatcacctaaaagcgattccattccttcaagtgcactttcgtctatggtgattgtcgtcatttttatccctcaatcaaaaacataaaactagaaccgcaactttagctgttcttagtcaaaaagcaaacctgctttgtaggttaagctcatgtatactatggatacttttaccgtattccgagtttatatggctagagaattatgctcccactgtggcttttctactaaaacttgcttatgtgattctataaacataatcaataatagactaaaaatcattatattacgccacccaagtgaggaaaaaattactaaaaacacggcgcatttattgaatttaggcttagccaattgccaaattattgctggagaatctgagcaagactttgtttcgctgcaaactttgccaaaatctagcactgctgttttatacccaagccatgacgcatggtgtcttgatgagcaaagctcagaagtgaatatatttaaacaaacactaacacatctgattgttatagatggcacctggaaaaaagcatttaaaatgcgccaacttacccctagtttacaacagtttaagaccgttagttttaagcaactacctcaaaatcagtatttaatacgaaaagctccccgtgaagatagcttgtcaacattggaggctgtagcccatagtctgcacttaattgaacagcttgacgttacgccattgtataaattactcgcagcattagttgacaagcaaactaagcacatgccagaagatgtaagggctcgatatctttaatgcgtgtttctaaacgattgagtgcaggttttaatcgccaaggccccgactaccgctttgatgatcaagttgatttcaatgacattcgtgacacgtttgggtttcgtactatgttagtgggtagctgggtgaacaaacaagagcgtctactcgcggctaatttaatttatgatgccctagccgatcttgctcaaatattgagcttaccgccaacagctattggtctgcggggtaagcttaattttgcttttggtcatggcggccaaaaaggcgtacaagcacattacaatgcccatagccaaacgttagcactggctaaaaatgccgggggtggtgcacttgcacacgaatggtttcatgcctttgatcatcatatctgccaacatttatttgcgaatagaaaaagcatgcagttttgttctgccttatggctcgaacagtcaccagatttaagtcacccacttaatcagcgcttaaatgatttttatcatcaggtttttttagataactcaggtgcaaacccaaatgagtatgtaaaacaatctattgcttttgatcagcaagtaaaacagctatatatgagcatgcctgaggaactcgcagctcgctgttttgaaaagtgcattgccatgcaccctgatataaaaaatagctttttagtaagtggtttatcaacaagtggcttaatctatccagatgagcagcatgcgatgcgctgctttgcagcactgctaaattactttaatcaactaggttcgctgttgcatcaaaactaagttcaactttctgcacctcactaatccaagctaaataatcatcagcacaaagcggctttgaaaaataatacccttgtccaaactggcagccataactttgcagcatagttaggctttgctgatcttcaattccttctgcaaccacctgcgcgcctagtgtggcagcaatgtcgcaagttgcccgacagatactctgatcatttactgaaaacggtagatttaacacaaattgtttatctattttcacttcatcaaagccaagttggcttaaataagcaagtgaagaatagcctgttccaaaatcatcaatcgcgagttttaagccaattaaacgatagtcatcgagtgtggctttaatctttttactctcctctaatgtagctgactcagtcagctccagcataaccgactcggcacgcacattttgttcatttaaaatggtgattaacagcacaggtaagtctttatttaatagatctttagccgaaatattaatggaaataacgtgatcgggtatcagtgtgcaaaacttcgcttgccactgaattccattttcgaccacccattcagtgagctgattgatcacccccgcagactctgcaattggaataaacacatcagggctcactgcaccaaatactggatgatgccagcgtaagagagcttcacagcccactactttgcctgttttcaaacaaacctgtggttgaaagtgtaagcttaactgattttcatctatcgccattttaagtcctgcggcaatcgataatctttgttcagaaagccgcgcactctcagagtcgaacattcgccaacgctcaccttgtaaacgtttttcagacattgcttgtatggcacattgtaaaatttgcttcgcggtattgccgtgcatcggataataagcaacaccaatatcaacactatcgactaaattaatatcttcatgggtgagcccttcttcaaataccccatggatcaaacatgcaaactgctctatatgactgagttctaattcacctatcactaagcaaccaaacgtactgtcatcaacatgagcaagccatgcgcttctactggcttgaatttcaagctttaatgcattcatggtctgtagctgagtatttaagatacttaatctttcattgatacaaatatttgcttgctcaaaaccaaacgtagaacgcgcatttgaaagaacatgtggtttaaataataagacggaaaagtgctgtttctgcgatacttttttcatcatttgtgcgagcaaaaattgcttattaggcagtttagtctccgcatcatgcagcatcgaataattaaatgccgctatttgctgacggtctttaagtaacagcacggaacatatcgccagtgatgtgataagcaaaatggtgttatgaacaccatggtaaccaataccaaaaccattccaaatgaataaactaagcacctgagtcacaatcgtcattaacataaatacacgtagataggtgcggctattttttcgctgcattacactaaaaaatacagcagctgcaaaacttaaaaacccaatacatgaaactataaataaccattgatgattaaactgaggcaatagtgatgacaacacggccgcgctgactaaacaggccatcattacttgccacgcttttttaaagcggggtctataggtatggattgccagaaagtgatataagaaatagctcgcaaaatataatgcaaactcattaacaggccattttgcttcccaatctatgccgttaacgaaatagcttattagcccgttatcaatcaaaaatccgatactaaccagtacgaagtaagcattcagcagcaggtattttggttgctgcgataccacaaaataaatagcgcatacaaacatgcatataatcagcacacctaaaatagcgccatagcttaaaatgatttgatgtaagtttatttcaaaggtttttgcagcaactaccccaacttctatagtcagcgccctatcgtgctcaaagttaaccagtgcccagcgatgaccttgactatgctctattaaccaatgtggtcgcacattcgataagctttcaagtgaggcgagccgctgattattggtagcctgagaattttcatctaacagataaaactttacccaggttaaatttggctcacctagataaacaacgtaatttttattgtcgggtagttgcaataaatcgattattaaccagtgggatgtttgcggggcaaggcggattgaactgctttcgagagcatttagctgttctgcattttgaagtgattgttccagcgattgacttaatttggcaagaggctcggcagagtcaagcagccaaatcgatgaactctcattggcagcaaaggtactaaagctgtgtaaaaatacacaacacattgttatgagcagcgttctaacaacccgatggatgtgcttgccaataaaatgcattttagctccgtgctttaaacaccagctaaaagtatgggggtaatacgcttaaattgccaattatgcagactttaattaggtaaaaagtttaggcgtatgggcgtgtggcactaaaagccacacaatactttacttattatcatcacttattcgacttgcaacagctgagttttgatccttatattttgcatctttacgtgtgttgtaagggttctcagcaggacttgtcatggtttcaaaactcatagcgccaatcttcatcattgggcgtagcgctaatggcaatttacctgagttataaaactccaaaacaatatttcctgaccaaccgggatcaatacgatgtgcagttacatgtaccatcaagccaagtcgtgctaacgatgaacgaccatctaaccaacctacaatatcagcaggtaaagttactttttcataggtaattgccaaagctaattcacctggatgaaggaaaaaagcttcttcttcagcaagcacaatttcatcactcataatggattccatcgccttgtttagctgatcttttggaccacttaagtcaacataagctgcggtatgatcttggaaaactcgaaatttattgcccaaacgcaagtccaccgtcacacctgaaatcatttctttactcggtgtaggctcaataactatacggccttggtcaatatactgctgaatatgggtatctgataatctcatttattattctacctaaaacaacttaaacatatgattttaagctgaaaaaacacgctaagcttaaacttaaaaacacaaagagtttattgtgtagcagttaagcaaaatggaatggacatagtgtgacatatattacacaaatcagcagcgtgttgcgctaataaatctcgattaaataagtcttctcaggtaacaacatcagctgtttctgatttatctgaagtcatgagttttgttctaattgccgaattatagggagagtgaggataagttgttatggattacgttattttatccgtaataacattgccagcatgtgttgttgctattttaatcgccaaacactacgctaaaaaacaagaaatttggcacggctttctcgtcttcattggctcattgttactaacaagctggtcggtggttggcctagtcgcaaacgaaactttctttttcccgctaccttcattactcaccatggtcttttatctttattgttatggtgaaaccgacattgtgtttatgcccaatttattaattaaccccggcattgctattttctgctatttttcagcttactttttcagtcgcaataaacttttttaagcgctgtgtatcctttttatatttactaaaataaaaagccgctcattgagcggctttggttctcattagggttcatatgagattaaaagctataacgtgcaccgattgtgtaacgaggtccgtattgacgagcaaataagaactgctcttcataacggccataaccacgttcagtttcgttgttaaggtttataccttcaaagaaaactgtcatgttttcattaatgtcgtagttaacgcttaagtcccattgactaaacgtatcgccaaattgtggcggtgcatcagatgagccttgcgcttgaccaacaccaatcaagtacgaatcacgccaagcgtaagtaaccttaactgacaagccgtctttatcgtagaatgcttggaagttagcagaatcactcaaacctgataaaggcgcttgctgtgttaaactattaacatcaaattcaacatcaccatctacaaatgtagcgttaacacctaaaccgaaaccactttcaccaaacaagtgctgtacagcaacttcaaagccatctaccgatttgctatcagtattttgtggctgagaaatattccataccattagtgggtctgcactagttggttcaatagcaccatccgcattaccataaccaagtgccagcatttcattgaagattgcatcactcgttgcttgctcaccgcgtgcttcaactgaagctacggcttcttgataacgtggaccatttagaatgtcatgtagaccttctatcgttgtttcagtaatttgcgtttgaataaagttatcaacgtcttttttgaagtagccaactgatgcatagctgccttcgccatagtaatactcaagcgataagtctaaattcgttgactcaaacggcaacaggttagtattaccttgaccacctgtacgcgaacctggttttggactaccagttaagcttcgaccaccagcaaggttaccaagcggtgctcgtgccatggttttaccccacgaaacacgtccaacaagttcatctgtgatctcaacttttacgtcgatattcggtaaccagatatcataattaccttcttcttggtaaaagttatctgtaccaccagtttcgtattgcatgatccattcagatgcactcacccagttaacttggctttcaacacgttgacgaaccgtactggttacatcagtctcttcgtaacgtaagcctgcattaatttgaacaaagtagtcagataactcaaactcccaaagtgtattgacgtagaagctttgcgttttttcttctacatagctttcactgtcgataccatcaaaaaatgggtcaattgagtattggttatcgcccaataaatcttcgtttaaaaaagcaagctgacgagccaaagcttcttcaaagctataggtgtaatagtaatttggttcaagggcactaccaccaccagcgaactgatctagcatgtcacctgtatcattataagtgaacataccgtctgggaagatctctgtgaatgatgggttaaagccaggaccaccacgtaagccactccatgcagtaaaaccacccattgtttgtttggtattggcagcaccaaatttcactttaacaagtggaatttcaaagctgtcatttaaccacgtagcatgaagctgcgcttgctctacattagactcacccggcgaataaataaactggctgaagttagaatcaatttcacttggatcaagtacagtagtgccgtttttccaattcacatacgcatgtgggatttcaccagtgcgatagtcatacaccttgctacggagttggtcagaaccaagaatgatctggccgtcagaacctaaaccgtcatctgcaccattgtctgtttcattcttcgaatcgtgataatcgaactcaacttcccacgcatcgttgatttgccactctaaatttaaaccaattgagcgtgcttttacttctgtagtgccacggcttgcagtaaatgaaccatcgttaccactaatatcggcataaagtgcagtaccattttcatctagctcatagctatttatgttgctgccaaactcattccaaataccccaacctgttgtttcaacgcctgtaattgcacggcttgccgtgtaatcaaccgttgcagtgaagttttcaactggtgaatattgtaaagtcacttggccgttagtacgctcacgttcaacatcagcaatgctgtagttcatatcttttggaaagaaatggttaccaacacggttgccttcactatctactgggcgtgggtcaatgtagtcaccttcatctaatgatggtaaatctacattcgcttgccagccttgaatgtttgcgctttgttgttggaaatcacgctcttgatgtgagaatgaaacggcaaagccaactgaattatcaacatatgtattactgtacatcgctgagaattcaggagttacatcatcccctttttcatttgacgagtcgtgaatagccttaatagacgaactaaatttttcaccagggctatttaaagggcgagtcgttataatgtttactgttgccccaagaccaccacttggtacatctgcttgacctgattttgcaacttcaagtgcacttacaccgtcagcggcgatattttcaagggcgtaagaacgtgtataaccagtacccggcatttgacggccgttaagcattacgaggttaaactcagggccaaaaccacgcactgtgatttcgctgccttcgccgtttgaacgactaacagatacaccggtaatacgttgcagtgactcggctaagttagtatctgggaatttacccatttcttctgccgaaatcgcatcaactacacctgtagcatcgcgtttcatatccatggcgcggatcaaactgccacgaataccttttacttcaataatttctatttctttgtcagcttgctcatcttgcgcgtaagccatcggcatagtgccaaaccctgcggttaagatcatcgccactgaagctgcaagaggcgttttaataaattttgtgcttttcatgatttacctgcttttgcaatttgttgccatggtatgtaggtgccaatttggcacccaccattgttgccagtgttaattaaggattcgcaatgactgcattatcgatacggtaaaccgcaccttcacccatgccccatgaagggaacaccataacaacgtcgattgcactaatatcaaggcctgcacttagtaaatcggcaagtgtatatgtgtatgtttgccattcaccaaccactggctcgacaccttcttggcttgcacttagtggaagctccacagcttgccctgcatcgtttgattcgattttaaataaccactgcgcatcttggttacttgcgtttgaaacgattttcatttcaaaacgcactacaccttgagataacatgtgtgatgcatcaaaactcacgccatctgctgctaagaaacccattacagttggttgagcaccaatttgaaactcagcaactgagccgtgtgcttcgtcgtctgtttctacagttggtgtactaccagcacaacaatcccaaatgctccattggtctgctacactatctgcaaataaagtgagatctgattgcggctgcggtgcataaatacgtgcattatctatacggtacacagcaccctcaccttgaccccaagcagggaaaatcatgatgacatcgatagcactcacatctaaaccagcttgtagtagtgtgcttacagggaatgtgtaggtttgccactcacccgcaaccggatcaacaccttcagtactcgtattaaggttaacttcaaccgctgttgccccttcattagactctacctttaacatccatggtgcatcaggagttgatggtagcgatgttattttcatctcaaattgcaacataccgtcatcaacaagtgaagtcgcatcaaattcagtaccactaccacctgatgaggtgcggttaataaagcccattactgttggcgttgcaccaatagaaaactcagcagttacaccatgctcttcgtcatcaactacttcaataggtgttgagcccgcacagcaatcccacagaggccagtctaggttagtctcatcagtgaacagtgttagtgaaggtaatgttgttgaaccaccgttagtgatttcaacattatcaacacggtaaacagcgccttcaccttgaccccatgcagggaaaatcattacaacatcaatcaaagatacatttaagcctgcgtcagctaatgtttgtaatgggaaggtatatgtttgccactcaccagctacaggactaacaccttcagtgctagcgcttaggtttagctcaacggctgtcgcgccttcatcactttcaattttgaaaagccaaggtgcatcaggagtagaaggtaatgaagtcacttgcatatcaaaacgcacataaccgtcttctagcatagcgcttgcgtcataaggagtggcttggccgttttcatcggtaataaatgcatcacggctaatgaaaccatttaccgttggtgatgcacccacaacaaattcaacaacatcaccgcgctcagcatcttcaacaagtgcaggagttgaaccaccacaacaatcccatgcaggccagttagggttaaagctgctatcaaaaatagtaagcggtgttactgtaccatcactaggtggtgtaggtgcaggagctttaccttgtactagtgcatcttctaaattatcgtaaccagggcgaactgtttcacagcctttgcctgtatctgggtcttgtgcacattcgtaaacacgaacatagtcaacttcaaaagtttgaccattttcaaatgcacttgcgtcaatgcccgttgcattaacgttttctggccagtcaccgcctacagcaaagtttaagattaaataaaactcttggtcataaggagatgcatcccagaaagttgttaactcaccggttgtttgatcaaagtactctgtgtaccaacctttgtgtttaagtgccagagcttcgcctttagcattgtaaagtaactctgatttgcgctgtgttgcatatagatagtcgtctacataccaacgaatttcaccttcttgccattcaattgcataggtatgaaaatcatccgctgggttagtgccttgatcaaatgtataagccttaccgctttgatcattatttggccactctttaccatagtgaagcgtaccgtagatatttgattcgacaccgtcatctgttgggactttcaagttaaccgactcaacgatatcaatttcaccagagcgtggccaaccaccatacacttcatctgttggcatcatccaaaatgcaggccatgagccttgaccacttggaagtttggcacggacttcgaagcgtccatatttaaaatcagctttgtaacgtgtgttaatgcgcgcagaggtataaggttttgcagcaccctcttctgcaggtaatgcaacgatgtttagaataccatcagctacgaatgcattttcttcactgtcggtataacattgcttttcattgtttccaccgccagcgcaatctatttcaaaattccatttgccctcatcaatggaatcgccatcaaagttgtcttcccataccacaacccaatctgaaacgggctcacttgggtcaatggtatcgatttttgtgtctgtggcagagccaccgcagcctgctaacgtcgccacagatagtgccatagcgagttgcgttaagtgtgtttttattttgttcattgcattgaaccctaacattctgtgtttgttagtttacagctgatattaataacaaatattagtttcagccaatttgtaagcgcttacaattgaggtcaaataaaaaagaacaaaaatgtaagcgcttacatagagtatgacaaggttactaaaacgtcaataaattattaacaaataaaccgagtttattcctaaatttatcaatcatgcttcagtaatgcgtaaatacaggaggatgccaaataaaataagattatttcattaaaaactgatgcaaaatacacactaattaatgactaaatttcaataattagtcttctgtaataacaatatctactttgctggtctgggcttgttgataatataaactactagcaaggacccgagctgccgttttataagtacagcttatttcagccgcactatcctgcgctatcagatcaccttgctctgagctctcacgaatttcaattgccaatgggatattagccagcacaggcacaccatggcgatgagccaatgttacagcgccatctttgccaaaaacatggtttggttgaccacaatgaccacataagaagtaactcatgttttcaattaagccaagcacggggacgttcactttattgaacatagcaatgcccttttgcgcatcggctaaggctaaatcttgaggagtggtaatgataaccgcaccactagcaggtactttttggctcatggtcaattgaatatcacccgtgcctggtggcatatcaacgattagataatcaagctctccccaagcagtttcgttcattaattgattaagtgcacctgatgccataggaccacgccaaacggttgcatcatcacttggtactaaaaagccgatcgactgcgctttgaggttatgtgcctcaaaaggaagtaagtttttattatcctctgttttaggctcagccccttgtagacccaatagcagaggaatagacggaccataaatatcggcatctaaaataccaacctgtgccccctcttgctgtaaagccgaagcaagattcactgccgtcgttgattttcctactccacctttgcctgacgcaacgagtacaatatgttttatttgcttaaaactatatacgttcggtaacttgacctgagcagtaattgacacaggcacagatagtttatcactgacaaacttttcaatttcgttgatttcgccacagccagcaaaaggtaggcttaatttgacttgccagcttttatcgctgttttgatttagctcttcgagccagtcttgctcaatgccaatagcaaatgcgctactacgataggcggctaaggcagcaatgataggcgctttttcagccgatttacttgagaatagttttgacagtccaaacatagcaataaattagcgtttctttgatgaaaagtgctgcggaattatgtaacattcaaggcattaaaaccagacaattagataatatcattgctttagcttgtatataaacaactggcaatggattaaataatgatattcgtgcatgtttgcatcgaactaatctcaattcggaatgattatggcacagcgaaagatcctgattactagcgcattaccttatgccaatggcccgactcacttaggtcatttactagaatacatccaaactgatatttgggcgcgtttccaaaaacaacaaggtcatgaaacctactacgtttgcgcggatgatgctcacggcacaccaattatgcttaatgcgcaaaagcaagggatcacgccagaagagatggttaaaaacgtcagtgttgaacgtcaacgtgactttgctgatttcaatattgagtttgataactatcacagcacgcacagtgaagaaaaccgtcactttagcgagctaatctacaaccgtttaaatgaagcgggtcacattaaaaagcacactatttctcaacttttcgacccagagaaaggtatcttcttacctgatcgctttgtaacaggtacttgcccaacgtgtaagtctgaagatcaaaacggcgacagctgtgattcttgtggtgctacatacagcccaactgaacttatcaacccacgctctgtaatgtctggcgctgagccaatcttaaaagattcggagcattacttcttcgaccttcctgcttttgaagacatgcttaaagagtggttacactcaggtacgattcaacaagaaatggcgaataagcttgatgaatggtttgctgatggcttacagcagtgggatatcagccgtgatgcaccttacttcggttttgaaatccctggcgcaccgggtaaatatttctatgtatggttagatgcgccaattggctacatggcgagctttaaaaacctgtgcgacaaaaaagggattgattttgatgcattctggcgcgaagactcagatgcagagctttaccacttcattggtaaagacattatctatttccacagcctattctggccggcaatgttagatggtgcaaaattcagaaaacctactaatgtttttgcacacggttttgtgactgtaaatggcgcgaagatgtctaaatcaaagggcacctttgtaaaagcgcgtacttaccttgataacctagatcctgagtatcttcgttattactacgcagcaaaactaaataacggcatcactgaccttgatttaaaccttgaagactttgcactgcgtgtaaactctgacttagtaggtaaagtggttaatatcgcaagtcgctgtgcaagtttcatcactaagaaatttgacggtaagcttagcgacaccgtaatggacgaagcgctattaggtgagttccaagcagcttctgcaagcatcgcaaatcactatgaaaaccgtgattacagccgtgcaattcgtgaaatcatggcccttgctgataaagcaaaccaattcattgatgctaaagcgccgtgggtgttaattaaagacgaaacaaaacaacaagaagcacacgatgtttgctcacttggtttgaatatgttccgtgtacttatcacttacttaaaacctgttctgccaggtatggcagcaaacgttgaagccttcttaaacgacggtttaacatggcaaggcgcgcaaacagcgcttgttggtcacgcaattaataagttcaaaccgttaatgcaacgtgttgaaatggataaagtaaacaaaatgattgaagaatcaaaagaaagcctagttgctgaaaaagacaagattgatccaaacagcccactagctaaagagccaatcagccctgaaatcgaatttgacgactttgctaaagttgatttacgtgtagcgaaaattgctaaagtagaacatgttgaaggggcagataagttattaaaactaactttagatttaggtggcgaaacgcgccaagtatttgcaggtattaaatctgcgtatgcaccagaagacatcgaaggcaagctaacggttatggtagcgaaccttaagcctcgtaagatgcgttttggtatgtctgagggcatggtattagcagcaggccctggcggtaaagaaatttatattcttaacccagatgaaggctcagagcctggtatgcgtgtaatgtaattacacaattactagcttataaaaaaccgttgtgtttaaggcacaacggtttttttgtttagctaaggtgctaagtataaatcatgcaaaacccgctcttttcgaggtaagtaataatcatcataatcgagtgatacaagcactcttttagctttacctaataactcactgcgaggcactaagccaattactcgcgagtctgcactattatcgcggttatcacccatcgctaaatacatgtccttggggataacgacaggggcaaaatgctgcatcaccgaagccgtttttgatatttgaatagcgtgctgaacaccggcaaggttttcaataagtgtctgctgctgttgctcatcattatatagttcgtaatcaagcgctttaccgttaatgatcaatttattatctactaatgtcactgtatctcccggcacgccaacgacacgctttattaagcgattatttgcagctttagagtcaaatacaatgatatcaccggcttttggctcatctgtgcgcattagcgaaatatgactaaatggcacacgcagatcataagccattttatccgttaaaattcgatccccttcaacgatggtcgggttcattgaacctgttggcacttcataccaatcagccaccgcacttctaaaaacactcatcaagcagataaataaaaccaaagagcggttatttttccatactttcaaaagccagttcatattcgttccttatttgttgtttgttttcataagagccactgcggttcgaattagttcttaactaaatgtaacgaaatacgtcaatgataaaaataccatacatgatgtcaaaattatttgacatcacaagtaatgagtagtttacttaacatcaagtcaaatattttttacattggataataacgatgagctacaaagaaatgacaatttggggcaccttggtggtaaccattggccttttaagctattaccttttagggattaattcacttcaagctgcaggtgagcttaaccaagataccatggtgtcttatttgtacaaggttgttgtagtagcggtgatcttagagattattgtgcaatctgtgcttgcaggtattaaacacaaagaagcagacttaggagatgatgagcgcgataagcttattgagctaaaaagcaccaaacttggtcattggttttgctctgcaattatcttaatgtgtgtatttttaacaacgcaaattgagcgtgtgtctggacgtatgctgttacctgaggtctctgatctatataatattatgcactttcttattattggttttttagtgagtgaaattattactattgctagcaaagcgtatttatatcgaagagacagctaaatgacaaaacagctcagtaataccattcgagaacttcgatttcatcacaatgaaatgacgcaacaagcattagcagaggctgttggtgtttcaaggcaaaccattgtagcgattgaaaaaggtaaatattccccctctcttgaggtggcttttaagattgcacagttgtttgataaaaaactggacgacgtgttttcgtatcaataatactaacaaaaaaggttagccaaatagctaaccttttttcaattcgaatcattcaattttatgactgctgatttttgaactgcgctttggcttgttcaacttcatcatcactgatgccaactgattcagccgcttctttaataagatgtggctgagtcatcactaatgccatcaattgttgaagcttctctggtggaatacctaactgttgaaccaaacccattgccatcattgggttttccataaacgcttggaacagctcacgcactttttcatcactgacattgtgctctttgagcattgcaataattgggttcatactaacctttacttttaactactaataaaaccaataatatgggcaaattgctgttattcaactaacagaaccacttttcccgaattttcgttgttatctaaaatgcggtgcgcctcatttgcctcttgccaatttaaggttttatagatattgcaatcgaacaaccctttagccaaatcatcataaaagcgcgatataaactgctcttttaaatcgcgcttaaattcaattgaacggttccgtaacgttgatgcatgaaatgaaatccgcttactaagcagccttgcaaagtcaacctcagcaaagcgtgcatctaaaaatgctaacatcacaatttggcaatccatggctgcaacagcagcatttttatttaaatagcttcctgatacaggatcaacaatggtattggcctgtaaattattagctttaaaatattctacaaagtcggtggttttataattgatagtatggtctgcgccaagctgcttggcatgctcgcacttttcatcgctgcccgcggtaatcactacttgagcgcctgcgcgctttgccatttgaattgccgccccaccgacaccactggctcccgcatggatcagtgccgtttgccctgctttaagctgaccaaattgaaataaggcagaaaaagccgttaagtatacttcgctgatagctgcgccctgtgccatgctcattgcatctggtaaaggcatcacttgcgcagcatcaacggcaacatattcactataagcaccacccgcacacaaggcaaaaacgcgcttattaagcaggtcacccgatactgcactaccttgctcaacaatggttccggcgcattctaaacctaatatttcactgtcacctttgggtgctggatatttgccctgtcgctgtaaacaatctgcgcgattaacgccgatcgccgctacagcaataagaacttcgttatcttttagagttggtttatctgtttgcgcaaaatgtaactgtgagtcttcgtgcttaatataacgcatatcaccttctatttaattcgttgccagacctcagcttcgactaatttgccattttcatacaaggtgtggtgccacaaatcaccttctattttgtaatcaaatgccatggtcttaccaagtaatgaaggtacattaccataggaaaaagtttcgataaattgctggtcttgcaaaacatatttgccgccaccagcataatgaaagttgccttgcttttgggtgatatagctaaaatgactgggtgtaatcagtttaacagaggtaatttctggcgcttttgccgtcacatagccgtcattggttgcatatttgccttcaacaaattgccagctacctaataacggattggcgcttaccatggacgaaataaataaactcgataataacagtgtgtttttcatagtgcgttccttagcaattttttagatagcatacgctaacactatgttcctattaaacagttgtaggatgagattttttcatttgtgctctcatcgaagaaaaacgccaagactgtttataaggatatacatcaagcaattgcccatcgtttatagccgcttggagttgctgccacatagtagctgtaaatatatcttgatgggctgcattaaagtgctcaaaggcccgcttattggcactaaaaaatactttaaactggctcggaaatacgtcgttttcggcaatatcgaagtagctttcgctgcttagctcatctaatgagtcatcggtttttggcagttctctaaattgacactctgtcaaagggcaaatttcatcgtagtcatagaacaccactcttccccaacgggttacaccaaagtttttcatcagcatatcaccgggaaagatattagcccccgcgagctcttttattgccttaccgtaatcaaccataacttgctgcagttttcgctcatcacagtcgttgatgtacaaattaagcggtgtcattttgcgctctacatacacatggcgcaaaataagtgcatttcccgaaatcactaggctatcagcaatttgctgctgcattgtttctataagctcttcactaaatcggcttaaatcgaacgctaaatagcgaaattcatgggtatcaactagccgaccaactcggtcggcttgtttgacaaaatcgtatttagccatcacctgctgtttggtagccgtttttggtgcgctaaatttatcttttattaccttgtacacataatctgagcctggggtggtaaataccagcatcaccatgcctggcgtacccggcgcaagtgtgtatttatcgtcaacaggactattacgggtggtatcaactttgtaacgataaaactcggttttcgcgtgtttgataaagcctatggcattaaacaactcaaagcgttgcttatgaggcattaatacactgaggtaatcaacgtatcgggcgggttggtcagtatcgaccataaaatatgtacgcgcaaagccaaacaacaagctgagttgatcagctcccatcatcacagcatcaatgtgcagacctttttcactgtttaatagcgcaatcgcaaatggcatgttatcgccatttttagcaatacagcgacctatgatgtaacaggctttatttctaaaaaacaatgaattagcgtattcaatatagccatcattaagagcaagcagctcataaacttgtgggcattgctgttttgctccagcaatcaaggtgcgctgtaacatggcaacatcatcagcaaagttagcgtattctgagcgaaacacatgacgtttgatcaagctgctgatcgcagtttcaaagccattttgcagggaaatacggctaaccaatgaatcaaagggccttggccccaattgatagcgcgcttttaatacaaacaagtgcacattgcggatttttcgagagtcccagattgcaccgaaggttgaattaaaaaacgtatgagcaatgggctgattttcgtggctttgcaccatctctgcgtatatttgtttggctaatagccaaagcgctgggtcgtccacttcactataagcaataatttttaccgcttggcttacctttttgacttgcccctcgtaaacctgcaatcgcgatttcatagccccttgaacttgatgccactggcgctgttcaaagcgactttgcgcaccgagggtaatatttaaaaattctgcaaacatagcctcaaagccagcatacaccgcacgggcaagcttagtcgctacgacctgatttaactgttcgctgtgtgatttaacagccaaatgtgaactctgctgtggcattatttttatcgcttatgctgattattttagttgccttgtttacacacaatagcaagcgcgctttaatttaggtaattaataaagataataaataagattgatcaaatgaatattaggcacgtcgacctcaacctattggtgtatttaaatgtcctcattgatgaacaaagtgtgtctaaagccgccaataaactggctttgactcaacctgcaatgagtaacgcacttaaacgtttgcgtgatttatttgatgatccattattagtgagagccgcaggcacaatgacgccaaccgcaaaagcactcagcctcaaacctgaaatagaatcactgttaaaaatggccgaagaaattactcagccaagtgaaatattcgacccgagcacagcaaatattacgtttcggatcatggcaaacgactaccttgaatcaacgcttattgcgccgtttatcacccagcaactagcaaaaaatccggggcttaattttgatattttgagcccaagcgatgttaaccttcaggatatggaaaaaggcaccatcgaccttgccattaatcgctttaacggcctaccccgctcattccatcaagccagtgtgtggcgcgacaattactgctgcttaacacacccagacaacccttatttacagcagcaaaaccttgaaggctatctggctcaagaacacatttgggtgaatcgggctggttggggcgtagaagcggccgtgacgaataaatcaggcagccaaaaactcggctgggtcgatgaggccttatggcaactagaacaaacccgcaatattcgtgtattcacccgccattacatggtggcaagcttgctgtgccaatcaccaaaacttatcgccacactccctcgccgccaagccatgttattagcaaaacacactgatttggtgataagtccagtgccatttcaaatagttcctattgaagtgaaaatgttatggagccctttgttacatcacgcaaacccgcaccagtggctgcgcagagagctacttgcctttgccggtacggtggctgatcgctaaaaacaacataatattgattaaatcaatatcagttattgaaaacaacaatttcataaataatgagtgaagggctagagtgaagttaagcacataaacaaagagaaaatgattatggaaacttcagcgcaattcactcaacaggacggcctttacatcaatggtcaattacactcattcatcgagcagcagctttgtaaaaaaagcgatttagcttgcgaagaaatttaccaaacactggcaacgatggttgatgagtttggctgccaatgccgtaaaaccaaacatcaagatgatgatgttttacaagcagacacactgttaaaagcatatagctctgtacgttctcacccgcattgtcatgtagatgcgcaaactacaaccgcagtgctcgatgaatactgttgccaagtaccggcaattttagtggtagcgttaatggacacattaacaggcataacaagtaacgaaccaggtgcagagcacatttaccaacgtgcagcacaattaacaggtaaaccatgtgtctacgctgttaaaaatgccaatgccgcttaatatggttaattatttgagttacttattcgagcgatgatgctttttgcaaaatcactgcaactaagcatcgtcgcaccggctactaggttagctaaatcaaacgtcatttcatttgcgctaagcgtctgttcaagcgccttttcaatgttatccgcagcttgatgccagcccataaaacgtagcatcatgaccgcacttaaaatactgcttgttggatttgcactgtcttcaccggcgatgcgattaaatgtaccatgagtcggttcaaaaaaagccacttcattatttaaatttgctgcaggcataatacccacgccacccacctgagctgtaagcatatcagccaggtaatcaccgttttgatttgttgtcaccactacatcgaattgctctggggtgagcagcgcttgttgtagcatattatcggcaatcacttctttgatgattaaatcatcttgatcgtctcgttcgatcactaaccaacgaccattttcatgcgctacagcgttaaactcttgctcagcaagggcaaatgcccagcgtttaaacgcgccatcggtaaatttaagtacattgcctttgtgcaccaccgtcagtgattcactgcgctctttaagggcaaagttgagcgcgtaacgcattagtcgctctgcagcctctttcgagctattttttatgccaatgccacattggttatcaaaacgaagtcgggtgacccccatttcttggcacagaaaatcaagcatacgttcgttgtcaatactgccagcctgccactcaatgcccgagtaaacgtcttcagagctgtcgcgtattacagtgatattggttttttctggttcttttaaaggtgatggtaagtgtggataactacgaatgggccgcatgttaacgaataaatccatctcatgacgaagagccacatttaaagaacgaaaaccaccaccaagaggagtagttaacggccctttgatagcaattttatattgcctgacagcatgtaaggtttcttgcgggaaccaatcaccatcgtaaagcgcagcagctttttcgccattgaacacttccatccaatgtatttgtttatcaccttgataagcatgactcaccgcagcgtcgacaatattacgcattacaggagaaatatcttggccaacaccatcgccttcaatataagcaataaccggattgtcaggaatatgccatcgccctttactatcgatagtaatttgtgcgccctttgctggcaccgaaatgtgttgatactgcatcaaactttccaagcaatatgttttaacattattagtatcaagaaatagctaatttgtctgtgctcatagcgaaataacgagcattcaactaattgatgtatcaattattagtgaatgacattggctatttcatcttccatagcgcagaacaacgaggcgataagttgtgtatcaatcgtgacggtgtcgtttttcagcgcagtatctacggcaacggccttaacataaagcttttcacattcgaacatattggctgcgccttttaacatatgcacatttctacttaaaccatcgatatccatgtttttgtactgttcacgcatttctacatactggctttcaaggcctttaatatagtcatctttgagggcctgaaattctttttcgggcaacttgatgtctgccaattcatcacaatctaaatagctggcaattttgtggctaaagccatttctgtcaattggtttggctattaaatcattaaagccttgtttcatataacgggtgacttcatgtttcatagtattggctgttagggcaatgataggtgcagtaacacctgttgcctgcatcatttttaatgcttcttgaccgtccataatcggcatttgaatatccagtagaataaggtcaaagctgtcttcgagggttgcttgcacagcgtctttgccattttcaacggtggtcactgtcagccccatacgctctaatattcgtgcaattaaacgtcggttatctggatggtcttcagcaagtagcacgcgcccttttagattttctggcgcatcgagtttactaaatggtgaggtttcaataagcttcacttcgctcatgtcattgagccaacgtgtgttatctgtggtgtacaccgacatggtgaaaataaattcactgccagaacccacattacttttaacgctgatatcaccatccaatttctgcgcaaggctctttgaaatgttaaggccaagcccggtgccaccatactggcgagaaatactagaatccgcttgataaaaggcactgaacaaggcttgttgctctttgtctgtcatgccgataccggtgtcttttacgcttatcgacaacttatcgttatgacagctcaccgttaaggttatacgccccacttgagtgaacttaagggcattggttgtgaggtttaataagatttgccttaaacgactcggatcggtgatcaagtagtctggcaacgggaactgataatccacactgaattttaagcctttatcgcgtatttgcttaccgatcaacgactcaatattggcaatggtggcaaacaaatctgtttcgactaaatcaatctctagcttgtttgcctcaatttttgacatatcgagtatatcgtttattaacccaagaacatggcggctattttgtaaaataacgccaataccatgattacgctcatgaggcttgatatcaccaagcataatgccgtctgcatagccaattattgaggtcattggggtacgaatttcgtggctgatatttgccaaaaagcgacttttggcttcattggcatctcgtaattcatcagccaactcttcaagctctaaggttcttagttgtactttttcttctaagtttttgtttagctctacgttgtcatcatgtaataacctaaacttgtcagcaacagcaaatgctagcaacatagcgtccattgccgtgcctattaaacccaataaatacaaattaattgaggtggctggcaacaagcctaaattagttaaattcccgaccatgttcggtagcatcatggcaatataggcaagcacaaaataacgtgccggcttaaagccaatcagcatacaacgaataccaatatacaagcctaaacacaaagcaacaccggttactaatgtcgcccaataaaaaccaaagcttggccataaaacacaaaaagggatgcctaaagtcgcaataacccctaccgttaaggataattgagcgagcttagggaacgtttcttttaatttgagtaaattattgtaaaacagaatattggttaatggtgttaaggcaaaacctagccaatgaaggtgcgggttatagtagccaaacaattggtctgatatatgaaaaaaatgactccatgcaaacacccaagatgccgtaaataatgcatagtaaaggtgagtaacatcacgtgagactaaataaattaataagttataaagtcctaacgcaattcccactccaaaacagagcatcatgatcatattttcaagagtaatggtttcaaaataatcttgataaggtgtaagtaccagttttgctggggtataaaagtaatcactttcaaaataagtgattagcgtatagtgtttatctttttcaagagataagcggttaccatagtgaaaggcaaattgatttggttttacaccgcctgtaacaaactgctgaaccggtgagtttggatcagtcatgtcgtagattcgactttctatttttgatacaagagtgttgtagggataaagtactaaatcttcaaattcactttgattttctatttcaacgattagccaataactgcctccaactgagctaatacgagattgtggctttttatttgcgcgccatttagagatctcagccactgacgacggaaacatattatcatttgcgcttaaaacttgcccaacatcatgcaggttttgctccgctgagacattcgtgtatacaaatgtctcttgtgcaaagaccgaagaacataacaatagaaaaagcagaccacaaatacacagctttaaccgcattcactagactccttcactacaacaagcctgctggtaattaaaattgaaaagaaacgtcaaaaccatatcgtctcccttctcctttaaagtcttcaagcatgcctaggaacgagcttaaatcgaactttaactgactgtattcagtatcaaataaatttttgccccacaaagtaaatgaccaattatcaacatcgtattttagatgcgcattaacaatactaaaaccttcttggcgggcatagggattcatgttctggtcaaaataaaactcagactgataatcgtaaataatgttggccgataacggatacgacgccaagctggtatcgtattttaatcccgctgatacattccatttagaggtaaaaggcagttgattatcggtaatgctattaccaagtgggtcaacatagtcctcaaattctgcatgggggatataacccactgcaagtaacatggctaattgcttagttgcttgatagttaatttcagtttcaagaccatagattattgaatcagcaacattttcaagtaattgcacaggcggcatttgcggtgtttctgacgcttggttcataaacacttgttggtcgttgtaatcataataaaacgccgcccagttcattcttaattgttgcttaggccagtacgactttaagccaatttcatgggcattcaagcgctctttaccgtaattcgctaaaattgcttgttcttcagatgataagaagccgccattgtagccgccacttttactgccatttgcaaatcgataataaacattgcttgcatcagaataacggtaattaaccgcaatttgccctgtaaaaccgttatctgattgctcatcagtaacgcgataaaatggcaccagcacaccagttaaatcgttcacatcaaccacggtatttaatgtggcgattgagtcatactctagtgattcatagtcatatctaagacctgctgtaatcatccactgttctgcgacaggcacttcaatttggctaaacacggccaaattctgcatcttgatttcattatcgtagataaaggtagccgttaagtttgttggtaaaatgccgcgaaaatcgcgtaaaatatcatttaaattatcttgctcaatggtttcatccgcgaaataaacaccactcgttagcgtgtaatctgcaaattcatttaacaatctaaattcttggctaaacatttgggtatctaacccaagtaccccttcgcataagcgagctggtgaaccatcgcaattaaaggcatggcttctttgaagatcattaaagctcgacaatgaagtaaatgtagtttgctcgtttacatgccaatttacttcagcgataaagccatagccatcagatttatgaggtgagtcattatttacgcttacctcaaaaaagtcatcactaccatcattaaagccaaagttatcaaaacagcgtgttgaccccgcatctgctggtgaacaaagttctccggttaaagggttcgctacaacaccaatactccctacaggctggacaataccgtcccaatcttcaatatgcgcttgcaggtaaagatcaacctcatcccattcagacgaaaaagatacacgggcatttttttgctccatgcctgccgttggcgagtctgaaaaggtattttttgttgagtattggtagtcttgatagttaacagcaacacgtaatgcactagagtcagttaattgctgattccacacgccatcgaggctcttgccattattattggctactcctaagctcaatgatccatagctatcaagctcaggccggtttgagcgaataaggatagcaccacccgttgaattacgaccaaataaagtcccttgtgggccacgtaaaatttcgagttgctcaatatcatacaaattcacaatttggttattggcggagccaacggccacaccatcaagatacatggcaacaggtgacgtatttgcggtgttgtagtcaagaaggcccaccccacgaatacttactgcggggggtgtcccctctgcggcgttttgcgttatttttacattaggtgagaataaaccaacctcagttgaatctttaatatgttgattcttgagtaattgtcctttcacttggctcaccgccacgctaacgtcttcaattgcttgaggacgcttttgtgcgtatacactaatgacttccatgtcttttctagtctctgcagcctgcgcaacagcgcttgcaatgacacagagtaccaagcttgaacaagatagtgtcttcagctttggatcaataagaaaaggacgcttcattcacattttgaccttaaaagagggaaacctgttaaattcttgtaatttccagcttagtatagaccaaaacaaagattaaagtcgcatacaaataacaaagactagttatttgtaatcaacaccataattgccatcagcatgatcattctttttcaaacgcatgttcaccgctaatcgttttgggtagaccgcaaatagaacgtgccgtttgcataccagccattacagcagcttcaacacagcccgcattaactccggtttttatccaatcgccagtgatccgtaaattgacaaactgactaccatcagtcgcaaggcgatatttactcgaatcaaccacagataacacatagcgctcactggggtctatattaacgcgccagtactgctgttctgatactggtaaaatactgtgaggatcactataaaaaacctgccaatcaaatttgttatcaacatacgcatcaggccaaagtgcctgcatatctgaactaaacaaattatgcatgttgcgtttgacttctgccttcatttgctctggaaactgatgtgcagttgcaggagggtaactatcacaactaaatgcactacaaaaataagcaatattttttgggccactgtcgcttggccaatcttctttatcgactaaattacccatcgcagcccaggtatcaaacggctcaacaaaaccacttaaaataggcccctcattgcttggcactgtgtctttaaaacccagttgctggttagttttattcaaccagacttggcaagcttgcgtagccacactttgaacttttgttgcttgcagagagagcgcataatcaacagcaagtaattctggggctacatgctcaagtgaagcaaccgacacacctaaaataagcgtatcaaagtcgataccatgacgaagagtgatagatggcagtgctgtattaaaatgctcttgataaacttctggccagttactccaaaaagactcaaggtttatttgatactcttgcagaaggtgtgcttgttcagaattaatttgtgagtaaattggctcacttggccaacaaggtaattgtttaacatcaattaacggcgcatagtcttcattttttaggctcacttgctgacaaagctctatttcacttaccagcggctcaccttggtcagtttgcccagcagataagttagttaactgatggaagaacttaaacttcacgccacgctgttttaataattcataaattggcgcgaaaataacatcgcccatacccgcctgcattttccacattacaccacctttatagcaaaggccaatacgtaacatagcaagcgcagccacaccggcttcaacattcggcttattaaaatcaccatttggataagcaaacactaaatcataaaaaccgcgaaccggtgctgaattcacactgtaagttttattcgctccatttttttcaagccactgacgaaaatcgtagcaattaatgacaccaaagccatctcggtagactttatcttttatcagccctgtgagcatagcaatggctaagtcagcgcagatataaagtcgtcttagttctgcgttttcatccagtaagtcaattatctgctctttgaaccaacgctttatcttgcgaacgatataccaaataacgaggcgatcagcttgtttacttgtgtgggttgtttgctgcgaagtaaactgcaataagtgcgtcagtaatgagcgagggcttgatactacttctgccgctcctgcctcaatatcatcgataaattgccttgccccactaagctgcgtatcaatatccgttttgatctcttggtacatatacttaagtaaagactgatctcgtgattttttggtcaccaattttgttttagcttggtgctgctgacacactagttcaatgccttctgtccattttttgagccatgctaatgtcatggtgataaaatcccacaccgaaatatcaaggctgccatcagcaggatttccagcaacagttggaaaatcaataggccaagtttgccattcgttatcaatgaattcttgcaaagcaataaaactatgcggtttgaatgcctgctgccaggttgccagcgaacaactagcaggtcggttgagtgagttatatactccttcaagggtacgaaaactatttacataagcaccaaaccacacgtgtaaaccatgctcttcaatacgctgaccaaaatggctattacgaccacttgcgcccttgcctcctaagcgccagccctgttgatacacggttatttcacgatgttgctgccagtctgactgctctgtcagataaactgcagcggtcattgctgctacaccgccaccgacaatagtaattttttctttttgcatggttatcctttactctggtaaaacttgagttgcgccaagttggtcaaaatccatattgacgtaaaacggtaagtgaacagattgtttgccaagtgctatgccgaacatgtcattaagcggaaaactcgccagagatttaacattaagcttaaaatcattgtgcaaaagtgttaactgatggacttttttgattacagacggtgaatgaactacgctctgataaactgctttattaccctctccatcgggaaattgcttaaacaaaatttgatccatctggggatgaatgaaaccctctaacaattgttttagcagtgctaagtcaatacctttaacttgagggtcaaataaatcagcaacgcgttttgaaaatcgtgaaacgttgtcgagcaaatattcagagatgctcgcgtccgtttgttcaatagttagtaactcatgcattgctaatttagaatcaggtttaaacacatcaaagcattcaagggatatagcaaaccgaccagcgtcatctaacgcagatggcatttgatattcacataaatatttattgtaaccccacgcctctctgccattaattaaagcataaatgttatttacgctgataaacgccggataccaatagaggtgattaatatctcccttgaccatttttgctacgggaagccaaataatgatatccgtttcttgcatccacccatgctctgaaaagggaggtgtcaaagaagagattttttctatgtcagtgaaggtgagcaagcaactgctacctaatacattaaaagagactgaatctgtagccagtaaattcaatgtggtatcaacataaacctgcatcttttgctcacatgctgagacaaaaaaaccatacatttgcgcattcgtcatgcgacagggaggtttagcaacagggttcgataaaaagtggctgtaatttgaatggtccgtcatagttattacttataatattgtttagtaataactatagactagtctttatgcattagtcacgagttgttcgcaatcatggctgagcaaaagttgttttgtaaagtactgaaaagcgcgttgattaaagttatctgataaagggttcataaacccatgctcatattgtgtaatatcacattgaacacctgctttagcttttaaagcagacaccaccggagcaagctcaaaatgcgtttcttttttaggaaaaataaacctaaatggaatagacgcttcaagctcaaggtgatttctcacttgtgatgggtaaaaagcaataacccgttttatcgctgtatttttcaactctgcttgagcacgccaaacagctgttgctccagcactaaacgcgataattgttgtaggctcacgcagggatgacattttcagatgcactttttcgagataaccgtcatggccacaatgagtcagaaagtgttgatattgaaactgttcattaataggaagttgaatttgacccgaatatggatcacataggcacgttttgccacgaagctgctgagcaagctgggttaaatgcgcagttttcccaaaaatatccgttactaacaggtaattcatggtcatacctatttattgttgtttttgtgccaattcacactacacttgtttcgaaaaaatatccagaaattaattgctgtgtttaaaaaataaaccttgcactatgaaaaatcttaacgtaatctagtcctctggttttaaaaaacctcgcggttaaccccttaccttgatccagtaattcccgcatattcgtataaacacttgcaacccgagttgctaaatgacatttagatgaatttataaatcatcactaaactgtcacaaacttagtcaacactgtatgcaagacaacaaatgtcggtctgtattttttaatgccttttaaagctctacagacacagacaaaaagaaagagtgagttttattatgtcatataaatacaatggatctttgatccaaatcgcacatccagtgcaatcaatttcggttaacaaacagcgtgtaatctttagtgacacgcagggcttgaaaaatgccattttccaaaaggcgagtgatgcccgtcaatttgttaagtggttaaaagccaactaaaaccatccgattaacgccagctacaatgctggcgttatagtctacatacctactatcacaaacctaaatccctgctaaacttagatttaacaatacttaattataggtagtaacaatgcgtcgtttctggttgcttttgttatttttttgcagtgctgtttcacaggcaactgaacaaccaaaagtcattgagtggatcatggttgattttgctccctactacatcatgaatgacaagtatgaaggtacagggcgagatgagagcgtaatcaaactgcttgaacaagcgatgcctgattacacttttaagcgctccctctttcctgcaagtcgcgcagtgcatgagctatcaaatccatataataattactgtatgctatctttgtaccaaagtgagcatcgccgtcagcatattgttttttctaaacatacatcaacagttgggttatccccttctatcgcaattagaaaagagttagtgaacactctagaactgaacacagcaaagcctgtttcattaaaaacattacttgcagataagcaccttgctcttggagtgtctatgagtcgctcatttggcaaagacatagataatgttataaacaccagccatgatgccaatattatctcaagacccggtcgtgacactttagcaagtttgacatacatgcttaataagaaacgaattgatatattgcttggctaccccagcgagcactactatttagctcgttcaatgggatttgaagatgagctcacacaattgacactgtcagaggcgcccgatttaagccttggttatattggctgtacgaataacgaacaaggtagtgagcacataaaagagttagatattacgcttgaaaaaatagcccatactcaggcttttcacgatgtgatgataaggtggctacccgataatttgcagcctattttggaaaagagattaattaaaagaaatgaaagtgccgcccattaagcggcactgatttaaactgttgttacttacgaataccttcaataaataaaccaatatcaacatttgttgatgctgggccaaggttgtagtcgataccatagtcagctagttttaggctagtttcgccttcaaaaccaacgcggtaaccaccccaaggatcctgaccttcaccaattttatcaatttcaaaagtaatggttttagtaacaccatttaaggtaaattcacctgtaacatccgcttcatcaccgtcttcatcaaatttaattgatgtacttttaaatgttgcagttgggtatttatcaacatttaagaagtctttaccacgtaagtgcttatcacgctcggcatggtttgagtcgatgcttttagtatcaatcgttacattgattttagaagcgttaggagctttatcgtcatagctaaaatcacctgagaaggtgttaaagcgaccatgtaaccagctgtaacctaagtgcttaattttaaaagtaacaaatgcgtgcgcaccatctgtatcaataacgtagtcagctgcatttgcgttagctgttgagaaaagtgcagcacttagtgctgtgcctaatagtaattttttcatgttaatcatccttcaatggtttgatcattctaattaaggttttatctttatcgataaaatgatgttttagtgcccctaaagcatgtaaaacaaccacagctattagcccatacgcggcataaaagtgaattttacctgcaatatcttcttggttcgcgaccgactcgggtaatgccggtacagcaaataaattaaatacttcaattgcacggccatcagccgtagagattaaatagcccgatgtcacaataacgattagagctaaataaatcagtttatgtactgagtgagcaacatgattcattgcctttgagctaccagcaacaggctcaggttgagtacctaacaagcgccaaccaaaacgaaacaacaataatgccgctaaggtaatacccacgcttttatgtaaatccaaagagcctttgtaccatgcgtcataataggttaactcaaccatatacacgcctaagccaaacaaaccaaacaccccaagtgccattaaccagtgcactaagatggccacccagccataacttgactttgaattctttaacatactcatttcctatgagaattacgaaactaagtacagcttagcttaggatttatataatgaaaatagcgtaaaacgaacagcttctgtgcatatatgcacacttcagagtaaagaggaaagttaaaaggcaaaggtcatttaacttttaactttgagtagcttaagaaaattaagttttatattttacttgctattatttcaatcctgtacacttcaacaccctcagtcccaacctcaatcgttgcaggttcattaaggtttaccattaacttaggttcttgaaatttattgtaagagccattttcaaatttatagagtgctgacgttagtgtcacagtttggtcgttcaatgtaggggttacatcaaatttaagaatatcatctgcggtcactgtttgagttttgtcttcttcagttttaacaacgtgcgtttttacaagttgattattcaaataaaggttaaggtctaattgcaaactttctgcagctgaggcaccaaatgcagcgagagataacagtagcattcctaactttttcattatattttccttaatagtaggcttaccccaaaatgggaaaaactaacttatcagctactgagtcttggcgcaattgtttaacactttgtaagttaagtgttttattagaatacaaagcacactttagtgattatctttatcttgactggtgatgacctacttgccatgaagaagtcacagattttgaaacttaaatctaaccacttaaagctttaaatagaaaaattttagcttccagctattcgctttcttccactaaaccaacatatatctggctattggcatctacctgaaagcagctgatcaggttttctttcaccagttctaacatggcgataaagctaactacaacaccgcttctgccctcttcaatagtaaaaagagtatgaaaaggtaattgtgattgggcttctgagagcttatctaagattaagctcatacgttcacgggtcgataaagcctctgcggtaatatgatggtgctcaaatgttttagctcgggccataacgtcgcttagtgcaactaacaagtctttcatgtcaacgtcaggtaacagtaactcacgctcaccaaattctggcaccattgcttcggctacaaagatatcgcggccttcgcgaggaatttcgtcaaggttttcggcagcttttttaaattgttcgtattcctgtaaacgtcttacaagctcagctcgtgggtcttcttcctcttcaagctcttcatgttttggtagtaataatcgtgatttaatttgtgctaataaagctgccatgacaaggtattcaccagccagttcaagctgaaactcactcatcatttcaacataactaacgtattgctcagtaatgctaaaaatagagagctctagcacatctagtttgtgttttttgattaaatacagaagtaaatcaagagggccttcaaaggtctctaaaatgatctccaacgcatcgggaggaatatataagtcttcaggtttgtcgaccaccgctttgccatgcaaaaaagccagtggcagcttttgctgtactggctcttgtaagttatcttgggcatcaagctcttggctagtcaatgaaatctctacagttcaaatggtttagtatcaccacaacccacacgtaaaatttcgatatcatcatccgacaaatcaatcactgtggttgcttgttcaggaagataaccaccatgaataattaaatcaacttgcttttcaatgcgatcgcgaatttcatcaggatcagcttctgtaaattgctcacccggtaaaattaaagaacacgacattaaaggctcacctaactcagccaataaagcacaagtgatcggatgttctataacacgaataccaatggtttttttcttctcgttcaataaacgctttggtacttctttagtgcctttgaagataaaagtataaggccctggagtgttatttttaattaacctgaataactgattatcgacgcgagcataggttgatagctccgataagtcgcgacataccaaagtaaagttatgatgtttttcaacaccacggatacgctcaatgcgctcttttgcttgcttattaccaatactacaaccaattgcgtagcctgaatcggttggataaacaatcacaccaccttgtttaattatatcaaccgcttggctgatcaaacgtggttgcggattatctggatgaatatgaaaaaactgactcattatacgctcctattgcccttcccatacttgccaaaccccttggcaatcttttggtaagtataaatttttacccagctctaaccaacttgtcggaaaatgaaaatctgagccttgcgatgcaagtaacccgtattcacgactcaattcacctaaaaactggcgctcactcggcgcttgctgtggttgtgccacttccatagcatcgccacccgcgtctttaaattcaataattaacttacgcagccacttgttcgacatttgataacgcccaggatgtgcaagtacagcaactccaccagcttgatgaatagcagcaattgctgtttgcatatcgcaccaactacttggcacatagcctgtttttcctcgccctaagtattttttaaatacgcctgggaagtttttagctacaccacgctcaatcagtgcacgggcaaaatgcgcgcgtgtaatttgtgcgttttcagcaaatgtttttgcttggtcgtaaatgccttcaaaaccatttttagcaaggcggcgacctatctcggttgctcgctcttcacgtttggcttgttgcgcttgtaataatgacaacagtgagtcattttcatcatcaacatttaagccaacaatatgaatttcgaagctttcccattttgttgatacttcaacaccagcaattaatttaagcggtaaattatcatcagctatgacttggcgagctggttttatggcacttaacgtgtcgtgatcggtaattgcaaacacatctatgtttttctcaaccgcgcggtgtaacaattgctcgactgatagctgaccatcagagtatgtggtgtggctatgtaaatcgtattttatcaaagggaaagactgctttacgtaagttcttgaatcaatgatgtgagtataacaaaattttactgcgagggcgtgattatcttatataactgtgtgttttaccctcataaatgggtaattacgataggtaaatacacaactcgtactaatatgtaaattaatgcttgacagtatcggctcaggtacgctttactgtatgcactttcagacacgttaaataagaaacaacaatgaacaaaacaattcaaatcacaatttggtggtggcactcgtaacaagcgggtgacgaattgtcgtgtctaacgatttctaaacccgctcatgtagcgggtttttttatatctaaattttaaggttttataatgaattacatagcaactcttacacatcattggtggtggcgcctggcttagcgggacggtaagggtctatctaatttataggcatctttatacgaaccccgccaagcatcgctttgcggggttttgttttttaaagagtttttgggaatgagggagaatgaggtttgatttttagtcatataacaacgacaccgggtgaagtaaccagtatcactcaagtgcgcgactacataagtagcccacttgcgttatacagtttactcgataagcctaattcactgctgttagagtctgctgaaattgattctaaagacagtgtaaaaagtctaattttggttgactcagcgctacgtattgtttgccaaggcaaacaggtcacactcacagcacagtctaataacggcaaacaattactgccttatttacaaagccatgtgcaaaattgttctgcagagcttgtagaagacacattaaccttaacctacaacgagattgccagcgatattgatgaagccagtaaactagttgcagataacgcatttagtgcactacgcagctgcataaatagtattaaaagcaccacagacaatccgttttctgtgtttttaggtggtgtgtttgcctacgatatggttgctaatttcgaaactctttctgatgtgcctgacggcgaaaacagttgccctgattatgttttctacctagccgaaacgttagttgtcattgaccaccaagcaaaaacaactgagctaattggtaatgtgtttaacggcccacaagtccatgctaattgctttgaggttggtcaacagttagagcgtttaaatactgtttgcgacaatgcacaaagctaccaagggcaaaagcaagcaggctcaaacccaatctctgtggatgtaagcgacgagcaatactgcgaacacgtcatcaagttgaaaaagaacatcgttgatggcgatattttccaagttgttccgtcacgtactttttctctcgcctgcccagactcacttcatgcttacagccaattaaaactacaaaacccaagcccatatatgttttatatgcgcgatgaagaatttgtgttatttggcgcatcgcccgagtcagccctcaaatattgctcagagagtaaacaagttgaagtataccctattgccggcactcgccctcgtggcaagtttgctaacgggcaaattaatccagacctagacagccgcattgagcttgaacttcgcaacgaccaaaaagagcgtgctgagcacctgatgttagttgatttagcgcgaaatgatgttgcccgtattagcgtaccaggcacacgtcacgcgaaagaattattaaaagtagaccgctattcacaagtgatgcacttagtttcacgtgttgttggcactttaaagcctgaactcgatgcgctgcatgcctaccaagcctgtatgaacatgggcaccttggtgggcgcgcctaaagttcgcgccgctgaattagttcgtcaaaccgaacaaaaacgccgcggcagctatggaggtgcagtgggttatttaactggcgatggcgctatggatagctgtattgttattcgctctgcctttgttaaaaacggcacagcctatgtgcaagcaggtgcaggtgtggtgtttgattcagacccacaatcagaagccaatgaaacccgcgctaaagcacaagctgtgatcactgcgattcaatcgacttacgaggcacaataatgacgacaacatcagcctataaaatctactttttagataactttgattcatttagttataacttagtcgatgaactttctatgttagggtgccagttagtggtataccgtaataacatcagtgcacaaagcatctttgagaaaatgtgccaagagacagtacccttgttattagtgctttcacccggccctggcgcgccatctgatgcgggttgtttaatggaactcattgaactatgtaaaggccgcttccctatgctgggtatctgtttaggacagcaagctctaacacaaagctacggcggggttattggtcatgcaggcgaaactgtgcatggcaagtcatcaattattacgttgactgagcacccagtattcgcaggtatgggcgataaaatgccagttgctcgttatcattcattaatggcaactaaagtccctgatgatgttgaagtaattgcttgttatgaaaatattccaatggcaatttaccatcaacaagataatgcccttggctatcagtttcatcctgagtcaattttaacgccaaatggcgcattgctattacagcaaagcattgaatttttaaccgcacgcgtgcagtagaggaataacatggaagcaacaactcaaacccagttaaaccaattattagcaaagcaagatttatcgttttcgcaagcaactgcattgtttgatgccatcatgaatggccagcttaatgatattgaattaactgctgcacttatcgccctaaaactaaaaggcgaaacaagtgatgaaatcgccggtgcggcagcatcaatgcgcgccaatgcagtgccatttaaaaccagcaaaaccttgcttgcagatagctgtggtaccggtggcgatggctcaaacaccattaatattagtaccactgctgctattgtagccgccgctgcgggcatcaatatggtcaaacatggtaatcgcagtgtatcgagtaattctggctcagcggatttactaaaagccttgggtatcaatatcgatatgagccctgagcaagcggcctattgtttagaaaatacggggtttgcatttttatttgcaccgcattatcacagtggtgtacgccatgcgatgggcgtgcgaacagcccttaaaagccgcacaatttttaatattttagggccgctggcaaaccctgcagcccctgaggtgcaattgcttggtgtttatgacccttcgctgtgtttaccaatggccgaaaccttaaaaacccttggcacaaaacgcgccatggtggttcacggtgcaggcactgacgaaattgccttgcacgggacaaccaaagtggttgagctaaataacggtgaactgagcgaatacacgctaacagcgagcgattttggtcttgcaaactattcacttgaacaacttgcaggccaagggccagaatataacgcaaaagcaagcttagcgattttacaaggtcaaggtgaaatggcgcataacgcagccattatagccaacgttgccgcccttctttatttaaccgataaagcaagtgatttaaaagcagccgcagatcaagtaagcgaattattagcatcaggcaaagcgatggacacattgaacgcaattattgaggtaagtcatggctaacgtgttagacaaaattgttgccgacaaacgcattgaattagaacaaagaaaagcacagcgcccggttgagtcattcattggcgatgttgtgccaaccaagcgagactttgaagcggcgttagcagcaacaggcacacaatttattttagagtgtaaaaaggcctcaccgtcaaaagggcttattcgcgaaccattcaatttagacgaaattacatctgtttataaaaagtacgcaacctgtatgagcgtactaactgacgaaaaatatttccaaggcagctatcagtaccttgaatacgtgcgcagccaagtggagcagccacttatttgtaaagacttctttattgatgagtaccaagtttacttagcacgcttatctggtggtgatgccattttattaatgctctcagtccttgatgacgagcaatatttagcgcttcacaaagtggctgactctttaaatatgtcggtacttactgaagtcagtaatgagcaagaagtaagtcgtgcacttgcacttaatgccagcctaattggtattaataaccgcgaccttcgtgatttaagtactgatcttgcaacaacagagcgcttacgacagcttatcccaaatgacaaagtggttatttcagaatcgggcatttatacccataaagatgtaaaacgccttgcgccactgtgcgatggctttttaattggtagctcactaatggctgagcgcgacttagaagccgcatgtcgtaaagtcattttaggtgaaaacaaagtgtgcggtttaactcgttcacaagatgcgatggcagcctatgccagtggtgctgtgtatggtggcttaattttttatcctaaatcgccacgttatgtcgatatcgactgcgccaagcaagttacgcaaagtgccccactcgcgtatgtaggtgtgtttgtcaatgcgcctcttgaacaagtggtcgattatgctcaaagcttgaaactagctgcagtgcaattacatggtgacgagaatagcgagtatattcaaagtctcagaaagcaattaccgcttggctgtgaaatttggaaagcccaagccgttaaaggtgaattacctaaaccgcttgaaggggttgatcgccatttatacgatacttacagcaaaagccaaaaaggcggcacaggcgaagcatttgattggtctgtgctagagacggcaacggtaccttttatgttagccggtggtttaaacccagagaatattcatgcagcgctttatcgcggtgccaatggccttgacctaaattctggcgttgaaacgtcagcgggcaaaaagtgccaaacaaaattaaaaaatgcgttttcgcatatcagaaattattgaggttagaatgcaaaatccagcttatttcggtgaattcggtggtatgtttgtaccacagctgcttgtgccagcactcaagcaactagaggcagagtttaataaatcacaaaacgatccagcttttcaggctgagtttgaaaaactattaaatgaatacgcaggtcgtcctacgccattaactctgacacgtaacttagttaaaaatcctaaggtaaaactgtatttaaagcgtgaagatttactccatggtggtgcgcacaaaaccaaccaagtacttggtcaggcattgctcaccaagcgtatgggtaaaaaagaagtgattgcagaaacaggtgccggccaacacggtgttgcaacggcccttgcgtgtgccctacttggcttaaaatgccgtgtttacatgggtgcaaaagacgttgaacgtcagcaaccaaacgtatttcgtatgaaactaatgggtgcagaggttattcctgtcacagcaggctctggtactttaaaagacgcagtaaatgaagcactgcgtgactggtcagcaaattataaagatgctcactatttactaggcactgcagcaggccctcacccattcccaaccatggtgcgtgagttccaaaaaatgattggtgaagaagcaaaacaacaagtgcttaaagctgaaggtcgcttaccggatgcggtgctggcttgtgtaggtggtggttctaacgccattggtatgttcacagactttattgatgagccaagcgtaaaactaattggtgtagaacccgctggtaaaggcttagatacccatcaacacggtgctacgctatgtaaaggcacaaaaggcattttacacggtacctatacttatattatgcaaaatgacgatggccaaattgaagagtcttattctgtatcagcaggtcttgattacccagctgtaggcccacagcatgctcatttgcatgaaactggccgtgcagagtacgttggtattagcgatactgaagcgcttgaagcgttccaactactggctaaaaacgaagggattattccagcgcttgaatcaagccatgcccttgcatacgcccttaaatatgccgaacaacaaaccgaagacactattttagtagtaaacctaagtggccgaggcgataaagatttggctcacgtacacagtgttttatcagaaggaggcgcgctatgagccagaccaaccgttacggacaaatgttcgccacattaaatgaaacgaatcaaggtgcctttgtaccgtttgttactattggtgatcctaataaagcactcagtgtagaaatcattaaaagcttaattgatggcggtgctgatgcccttgagcttggtattccgttttcagatccgattgcagatggcccggtgatccaagctgccaacattcgcgcgcttgatgaaaacattaatacccaagattgctttgatatcatcaaacaagtgcgccagtacaatgccgatattccaattggcctgttattgtattcaaaccttgtgtttaagcgtggccttgaaaagttctatcaagatgctaaagaagcaggcgttgattcaattttagtggctgacgtaccgctgcatgagtcaaagctatttcgccaaacagcaatgaaaaatggtattgatccaatttttattgcaacaccgaatgcagatgatgacactcttcgagaatgtgcttcatatggtcgtggttatacataccttctttcacgcgcgggtgtaacgggtacagaaaccaaagcacaaatgccagcagattcattagttaaaaagctaaaagattaccatgctgcaccggcattattaggctttggtgtatcaacaccggaagatgttaaatcagcactcgattcaggggctgctggtgcgatttcaggctctgcggttgttaaaatcatcgaggcgaaccttgatgaccaagcagcaatgctaactggtttaagagagtttgtagccagtatgaaagccgctacaaagtaagttgttttattacttaaaaaagggccttaaaggcccttttatgtatctactcattaattattaatggtggcggtgcacaccctctttaatctcttcgataaacttacgattaaaagcctctaagtcggctgggcttcggcttgtgactatgccatcatcaacacacacctcttgatcaacccaattagctcctgcattgattaaatcagttttgatacttgggtatgacgtcactttgcggtcacgtagtttgttaatttcggctagtaaccatgggccgtggcaaatcgcagcgataggcttgtttttgcctgcactgaaaaagccatcaacaaaggctttagcttcactgttttggcgtaaagtatctggattaaataaaccgcccggtaataatagagcatcatattcacttgaatctgtctcactgacgatgcggtcaacgcttacacgttttccccattgattttcatcccaaccagtaatgtcatctctttcaagcgaaacaacttcgacttcagcccctgcttcaagcaacgcactgcgcggtgatagcagctcactctgctcaaaaccatttgttgctaatatcgctactttcttaccgtttagttggctatttagatttgacatgctatctccttatttgtgaaaactcacactaatacagcagacaccatgccaaatataaccaattgaaaatattgaatttattaaaaattcaaagcgacacaccctgtaaaagctacaagacctttgcaaatcctgcttatagggcgtctttcagggcttttgctggtttaaaaacaggcttgttggcgcctgcaatttcaatttcatcaccggtttgcgggttgcgcccttttcgtgcagggtaataactcaaggcaaacgtaccaaagccattaatttgcacttggtcaccctcagaaagagacttttcgatagcatttaacatgctcgttaaagctgcttgtgtgtctttttttgttaattcgctgtgggcagccatttgagatactagtgcggctttattcataaaaatgctccaaaatacgccgcttaatcatctgaggttaagcggaaaaagataaggtaaaacaacctaaacgcaggtttaggccagattggctcgggaggctaagctttcagggcaactaagtcaaccttgtatcttgcgcaataacttgatacaacccagtatcattttaaattagagcatttataaacctatgcatgcgattattgaatacatcccgctgattttgttttttgcggttttcaagttagttgatatttattgggcaacagccttgctgatgctaaccaccttaattcaagttgcttattgttattttaaagatggcaaagtaccaacccgtcactgggtgttttttgctatagcggtggtattaggtacgctgaccttagtattccacgacgagcagtttgtaaaatggaaagccaccattgtttatgccattttcagtgtcactttgttagtaagccgctatgtgcttggcaaaaatcttgtgaaaaaagcacttagctcagttttagaaaatgcctctgaaagtaaacaagaaattgatgtaccagaagcactatggaataaacttaacctgttttgggttgcagtgaccgcaggtatctctgcgctaaatatctacattgcctataacttctcgctcgatttttgggttaactttaaagtgtttggtttaatgggtattacctttgtttgcgtgttagcaacgatcattgcccttttcaaatacttacctgaagatgacgaaaagaaagatcctaagcaatcttaatgtcataaatctgtcgtcttagcttgttagcgtaaataaaaaacacgctgagacgacattgaacgctaaccaataccgctggtttgaatttaccctcatatttgtttctttaccgctattaggcttttttctgcgtgcctatctcgcgaactggcttattcctgcacttattattttaatgactgtttgcggcatgttgctgttatcagacccccattttaagcgttttcgtttaactagccttgggcaatttagtgcggtaaaacgtcgcttatttagttttttctttttaggagcgctattctcagggatgttttacggcatcatgaatcaagaaaactggttttcactgccaagaaattcatttaacgattggctaatgttgttattgctctaccccattttatcggtgatgccgcaagagcttatttttagaacctacttttttcaccgctataaacggattatgccaagtaaaaccgtgcgtatcatcgtcagtgcatcggtgtttgcgttggctcacattgtctatgcgaatgtactcgcagtactgctggcatttttaggtgggctgctgttttcttacacctatgcgcaaagccgttctaccttcgtgtgtgttatagagcacagcttatgggggttatggatgtttacgcttggcttaggtgatgtgcttgatgcaggggcattctagggctataaaaaagccgcgcaagtgcgcggctgagtattgagctggcttttaaaatccgaaaatactaaatgcaaaaaactttgttgcgaccgtatttacaaagataagtaataaaattgccggaataaacgttgatagcgaaaagttcacatacttctctgtaaaactaccgatatagccttcagagccttggcttaactcttcagaaagattcgcttttttccaacgatacattacgaataaacacaccattaaaccattaagaggtaaaatcgtgtcgtaaaacacatcataaacaatatcgaataagctcttatctgccccgccgtaactaacaaaatttgttaatgattcaaccataccaaacgacatcgtacacagcacagttaaaacaccggttgatagagttaaaatagctaacgcttttttacggctaattcctttgcgatcacttaatgaagctgttggtacctcaacaatcgatacaagcgatgtaattgcagcaaaaaagactaataagaagaatacaaacgctacaattgatgcacccacgtaaccaatatcagcttgaagcgctaataaaattttcggtaagtatacaaaaatcatcgacactgatgagtcagataacgtacttggatctgtgttcgggttaaaactaaaaatagccggaagcaccataagacccgcaataaaggcaacaagagagtctgttacagcaaccattttagcactgccaactatatcgtctttcttagagatataagatgcataggtcattaaaatacccatacccaatgacaatgagaaaaacgcttgagctaatgcaccatttaaaacgctcgcatccattttactgaaatcaggaacgatgtagtacttcacaccagccatggcattatccagtgttaaaacgtaaacaaccagcgcagtgagtagtacaaataaagctggcatcataaacttagccgctttctcgataccttcttttacaccaccaaccagaatcaagttaacaatgattgcaacaacggccatatagccaaacactgtgtagctattgataaaagtgccaaaattatcaggctgtgccaaggcatccagattaccgaatgcagtttgcgataaataaccgaaaatccatacggtgatcaccatgtaaaaaacagcaatcataaacggcgttaataccgctaaaaagccagcaaagttccattttggatcattacccgctaagattttgtatgaaccaagcggatctttctgtgcttttcggcccatcgccatttcggccatcatcacaggcaaacagataaaaatcacaaacagtgcataaactaaaagaaaagcaccaccaccgttttttgtagctgaaacaggaaaacctactaagtttccgatacctacagcagaaccggctgccgctaaaataaaaccgaggcgggagctaaagtgctcgcgtttttcgctcatttaaaaaccttattattattttctcaacccagcgactctaccagtgttacaccgcgtatttcaagctttataagtgaaagctataagcaaagctgtaaagattatttagcaaatgaacacacatgtatgacacaataatctctcgtctattgctaacaatatgctactattttctaaaaataacattgagaactcactatgctgtatatgatttattcaactgatgttgaaaatagtttagaagcccgcaaatctgcacgcccagctcacttagctcgccttcaagagttagacgatcaaaatcgtttattcacagcaggccctcttcctgcaattgatagcgaagacccagctgaggctggttttacaggctcattggtggtcgcgcaatttgattcattagaagcagcacgcgaatgggcagcaaacgacccttatattgctgcaggcgtttatgacaactcagtagtaaaaccatttaaaaaggtgtttggttaaagcctgaactcaactgaatcaataattcagtgtttgttcacggcttattaactaagatctggctgtcaaattacagaatttaacgtaattacttgaattttagttaattggttaattaaactaaatgggtctggtttaggagttccccgtcatgcgcatattattagccttcagttttagtcttttatttgcattatcaagctttcatgctgatgccaataaaaaccaagcacctgaggtgactaaaaagcaagctgtgatgattgccaaaaagtctgaagatggccgaaccctaaaaatcacagagcaagacaaagtatttaccgtaagaattttaaaaacgaacggccatgtggttgacgtccatgtgaacaaaaagactggcgaagtgaaaaaggattaagaatgcgaattttagttattgaagatgatttacacttagcagataaccttcgtaatgctctagaaaaagagcgttatagcgttgacctttgtcacgatggtgaagctggtttattccacattactgagtacccgcttgatatggcggtggtagacttaggccttccaaaagtagacggcatcgaattaattaccaaagctcgtgctcaaggcattaccatccctattttgattttaacggcgcgtgaccgttggcaagacaaagtagaaggcctcgatgcaggtgctgatgattaccttacaaaaccgttccatgttgaagagctaattgcccgctgtaatgcccttatccgtagaagcgcaggtaaagcaaacccagagatgacagctggtcctatcaaaattcatactcgctcacagcaagtgtgggttaacgataaagaacttagcttaactgcatacgaatacaaagtgttagaatacctaatggttaaccctcaaaaggtaatttctaaatctgagctaacagagcacatttacgatcaagacttcgaccttgattcaaacgtaatcgaagtattcgtattgcgtttacgtaaaaagcttgaccctgatggcacccttaacccagttgaaacattacgcggccgtggttataggcttaaaagtcagtggtagcatcgcaaataccgcttaaagtaaggcaaggatttatccttgtctttgttttattagtagccctaccaattctgtttttctcaattggtaaggcttactacgcctctttggtcgaagcgaccgaaaaaacccttgaagctcacttatattcattaatctctgaagtcgatttcaccgaacgcggcattgttatgccaagtaccatcttaactccagagctaaatagattgaactcagatacctatgcgatgatttatcgcggcgacttacctgtttggtattctgaatcagccaccaacatcaactttattcctgataactttgaagctccagcaggctctgctgactttcgccgtgttgaatacaacaataccgtctattggcaattaacacttaccgttattttagaaaacattgaccaatcggagcatgcccgttttatcttattaaaacgtaatgatgctctacttaggctgatggatggctttaaacaaacactggttaattggatgtatgtgatgggtgtggccattgctgcgctaatggcaattggttttgtgtggagtgcaagaccactgcagcgtctcgataaagaaattaaagccattgaatcgggcgataaccagcaaataaaaggtctttaccctgttgagttgcaaactattaaagccgatttaaacttattgcttgaatcgcagcagcgccaaaaagagcgttaccgcgcatcattaagcgatcttgctcatgcattaaaaacgccattggcagtgcttaagtcaagcccattggccaatgatgctgatgcacaagagcaattggatcgtattaatgtgatgatcgaacatcaattaaaacgtgccgctacgggtgcctctgatacatggaaaaagcaaactcatattaagccggttatcgagtcaattttaagtgcaatgagtaaagtgtatcgcgataaagatattattttcacttctgaggtcagtgaaaaagattattttttaggtgataaaacagatttaatggaactgcttggtaatttaatcgataatgcttgtaaagcttgccgttcgcaggtcgatataaaggttaagcaaaataagcaattaactctcagcatttgtgatgatggaccaggtgtcccagagcaaaaacgtgaatcgctactaacccgcggcacccgactcgatacatatgagagtgggcatggtgttggtatggccatcgtatcagatttagtaaactcatataatggcacattgactatccgagatgcagaaaaactgggtggtgctgagtttatattagagtttaattatcatgataaaaaataaacaattcactataacactcactttgtgcgctgctcttgtaacactggcatcacaggcttcacaaacgccacatgattgccagttagcaagcaacaataccgaagaaactaagcgttatattcaatgtcttgaccaagtgattagcgatttgcaacgcgatcaaaaaatgtgggtaaataaactcactatggatattgaaaaaatcaaagaagacacgggaaatagtcaattactgcctatctttaaaagaagcttagtgaatcaagagcgctatctagaagacagctgtcgttggcgatacttaaatgaaatgccaaacgcaaccaaagcagccattacctataagctttgtgaaataaatatccttggtaatcacttaaatattctaaaacaacctcttaaataaaaggcgcgttagcgccttaatatttaatttttgcttaatctagcaaattgctattgatcaattgttaactcttcaccgttaccaagtaaagttgcaagccaccgcccttcttggctggtttctaaagcaatttttactatcatggtcagtggaactgacagcaacatacctactgttcccatcaaccagccccaaaaaattaacgataaaaaaaccaccagcgttgataaacctaagcctttgcccatgaactttggctcgacgatattacccatcactgtattaatcactaaatagccacctgcaatgatccctgcaactagtggcccttgcgttatcaaagcaagtaatacaggaggtaccgctgcaatgatagaaccaatattaggaatgtagttaagcataaaagcaacaacaccccacaatacaaaataatcaacgtccagtgcccaaagcataaacccagctaaaagacctgtagccaagctaaccatggtctttattgcgaggtaagagtttattgaccctagaaagcgatcaatttgttgcattttcatttctgggtcatcgagtgctaaatgaatttttttattcagcatcggcccttcaaacagcataaacaccacggttaatataattaggaacaggttggccattactccccctaatcccgttagcatattcgttgcaacatcgatcattttgcccggatcgaataaagaaataatctgctctttatcaatcaaaatattataacttgcagcaacattaaccacccaaacaaactcttcttttagttgtgttttatactcgggtagtttttcagagaaatcggtcatcgattgcccaactaaaccggcaaggctaatcccaacgccaacaataatgagcattactaacaccactgcaacgcccttgggaattttatacccggcaaaaaaacgtataaggggattacatataatggcaataaaggcagccaaaacaaaaggaataacaatcacacttgcagcttttatacctgctaaaacaatcactaaagccgcaaatataactaaactcttattaacaccagtcaggctcgacaaaataaaatccttgtaaactttttcccatcagtgtatgtcaaataagtagtaaaagaaaatcgaaaaacatctggcacaataaatgctcataattcatacaatttgtgatattattggccagtcgtattgtaaaaggagctaaggatggcgcatttaacagaacaagaactctcattttttaaccaactctttgaaaatgcagatgatggcagtgatgaagtcacaaacaccaaaatgtctgtaaaactaaacttacccgataaactcaacggattattaaagaacgctaaattgaccttacttgctgaagtgggtgtttatcaattatggttcccgctggagtttgttaatgatgaaaatggccaggttattcctctactcagtgctcctgaggttatagatacgaaaggcattgagcggagttggcgagcacctcatctaaatctgcaaactgaccactacattattctgtcactatcaagtacgggagttttgttaaaaccaaaacaaaataagccagacttttcaaaagagctgttattagcatttgagctgccaaaaaaagagcgtattgttctgtctgctaaacctgttcgcgttaccagcaatggtattgcagcaaaaattattacagtacacgagggcgaaattgctcttcgtcaataccttttcgagactcataaaaagcaacatgcccagctatacgaacatgccaatataagcactgaccttatctagttgcaggtaatgctaagcttcgataagcttggcattttgcacctcaacacaacaaggtatttttatgagttacccaatcggaacgcctggtaagccatggaccgacgccgacaaaaaagcgtggcttgaattacaatcagtaaaacgcagttaccgtgaagatgttgtctcacaacttgatgctctgtctacactctttgaaattgagcagtatggtgcactgagctatgacagcgataagtatcctctttacattttaaaaagcaaacaatggcaagcagacaaaccaactgttttagtcacaggtggtgtacatggttacgaaacaagcggtgtgcatggtgcattagcgtttgctaaagataaggccaaagactattttgcagaatttaatatcttagtggcaccgtgtatcagcccttggggttatgaaacaattaaccgctggaacccaaatgccacggatccaaatcgctcattctatgcagatagtccagctgaagagtctgccgcaatcatgcaatatttagccgacaacgctattgcaccctatgtgcatattgacctacacgaaactacagacactgataatagtgagtttcgccctgcactagcagcacgtgatgcaacgacccacgataactggaacatcccagatggcttttatcttgttgctgatagcgaacgtccgcatgatgcatttcaaacagcgattataaaatcagttgagaaagtaacccacatcgcaccaagtgatgagaataaccagttgattggtgtaccacaaactcaatttggcgttattaattaccaagccaaaaagctggggttatgtatgggcttaaccgatgcagaatatgtcacaacaacagaggtttaccctgacagcccacaagcaaatgataaaatctgtattgatgcacaagtagcctcaattactggtgctttgaactacattgttaacaaatagttagctatattttaaattcagagcgacttatttattcgctctgaatacaattaaacaaataaaaaccccaacaaaatccaattaaagaaaaaaatatgttttttcttttttacatactaaataactagacacatacatacaattgtataaaattcgcgctctttttaattcaaaagggaagcaaattggaatttaagaatcactatggcagtgtcagtatcatcactgatggtccaattattattggacaattttctggtaatattaacgcacgtttagtcaatgactttgcagtcgatttaaaaaagcatattactgctttagctggaaagccgtgggcatatattagtcattctacccaattacttgctaccacccctgatgcagaacgtggttttacccaattatttcgtaccctgcaaggcacaaactgtgtagcaaccgcttatatgtttagctcatccattgtgcttaaccaaatgaaacgcatcattgcgcaagcgcaatctccgattcaaataatggactgtttatttgatgatttagacagcgctaaagcttatgtgcaaaagcagctcgaatttgcaaagatggcttgttaactacaagccattttcacttttaggtcagggtcaatctcggtaaaacttagtttctttggtaattgcgatatcagcatcttctaatgcttgaatgtgaaaactgataggcgttacctttgatttcaattcatagccatcagcaaccacagtaacaggcacacgcttcatctgacccgcctcaactgtaatattttcgggcacctgtaagcttgcttcttcaataccactgataccgattgaatagctcaaactatgctgtgttttgttgataattgataaggtatatgggttttctactaagccttcaaaattaacacgatacagggcattacgatcacgaatgacagaggcttcaataggtgtacgcattgccatccatacaaccataccaacaacaaacaacgccgttaaaccaccatagccaagcagttttagtctaaatgggttggtcgttttgccttccatttgtttttcagaggcgtacttgatcaggcctttttgataattgaatttttccatagtgctatcacacgcatcgatacataagccgcagtttatgcattcatactgcaagccattacgaatatcgataccggccggacatacttcaacacataagttacagtctacgcagtcacctaaacctaactccttaggatcggctttacgtttacgtgcgccacgagactcccctcgcgcttgatcgtaggtaaccactaacgtgtctttatcaaacatcactgattgaaaacgtgaataagggcatgcgacagtacacattttttcgcgtaggaagcccgcattaccataggtacaaaaagcgaacaggaatacccaaaagctgacgatccctgacatttctaaggtaaataaactcatgtaaagagacttagcagggatgaaataagccataaatgacatagatgtaagcaaagagatcaccagccaagctgtatgcttagtgattttcttttgccatttacttactgaccaatcagctttatcaagtttaatgcgctggtttcggttaccttcgactttatgctcgacccaagtaaacatcagcatccaaattgtttgtgggcaagtgtaaccacaccaaacacgccctaaccaattagtgacgaagaacaaagcaaacgcgccagtcataaatagcatggctaagatcataaaatcttgtggtaacagcgttaatccaaacagggtaaatttttggctcgctacatcgagtaatacagcttggcgaccatcatatgggatccatggtatggcgataaacgttagcatcagcacccagcctaagtatcgacggatacgttgaaaatgccctttttgctctcgaatataaattggcccttcttggttgtagggcttgatgattaagtcttgttctttaatatcaaatttcattttgctacttacttttgtgtcggtaatagcctgacagagcaactatcaggccaacacaaattaaaatgtaaattactgatattaaatgattaatttaattctaccgcatcgataatcgcgatatatcacgaaagcgcgcgttatttcgcgaaactgcgttctatacctaactttttcatttttgatctaagggtactctcaggaagacctagcaaagttgcagcgccattttcacctgatatttgtccgttgcatcgcttaagtacctcacaaatatgctgcttttgtactgcatcaagggaaacaacttgctcattcggttgctcgttattcaacggcgcagagagctgtaatacagtttgcttagacaaaatagcttcacgctctaggatattttgtagttcacgaatattgcctggccaatcataattagccagtttagtgagtgtagctttgctaagcccctttaactgtttacctaagcgcttgttaagctgtgtaattatgtttgcagcaaggagcgggatatcttcttttcgctcacgaagcgcaggcacacgaataggaaagacatttaagcgatagtacaagtccattctaaagctaccctgctcgaccatttgccacaaattacgatttgttgcagccagtactcgaatatcgacttttaaggtttgactgccacccacgcgctcaaactcttgttcttgcagcacgcgaagtaatttactttgtgcttctaatggcaattctgccacttcatctaaaaataatgtgcctttatcggccagttcaaaacgcccttttctgcgctcattggcccctgtaaacgcccctttctcatggccaaataactcagactcaattaagtttgcagaaaaagcagcacaattaaccctaataaatggttgcttagctcggctactcaaacgatgtaagtttcgtgccaccagctctttgcctgtgccgttttcacctaaaattagaacagtgctgttagtttggctaactaaagtaatttgttctaacatcgtttgaaaagaatgactttgccccactaaacctgaatcttgccaatcttcgtttaactctgaaataagataagcattctcagcttgtagctgttcagataagtgctggacttgcgctaaggcatcacgcaatgcgacttctgtttgctgctgttttgatacatcgcgaaaaatcgcgactgcaccaattaaggccccatttttataaacgggtgtagaagtatactcaacagcaaaatagctaccatctttacgccagaatacttcatcgtttacgtggcgatgtttaccatcgaacatagtgcaatatatctgacattcatctgcgggatatggtgagccgtctttacgagtatgatgatgatattgatgtatttttttaccaagcagttcttcagctttccagccagtcatgcgctcagcagcaggatttacaaagaccgcattgcccgataagtcaaagccataaatcccttcgccaactgcattgagcaataatgtggggtcgtttaaaaattccttgatcatagcagtcactcaactcgcgaaatatcacgagtaattatgacaaggttaaacttgcttaacaagcaattacaaaaaaagcggcttaatgccgctttagatattttaatactcttataaggtaggcactaagataatttcgccctgagatactttcatatctaatggcaatttgctcagtaatgctaacttaggatcgttcatatttaacttatagacagggttaacggctaaaaatccgttgatcacttgcattgcctgatcatctaataagtttaagcttcccttaaaacctgctgtatcgattgtagtatcaaccagttttacattacgtaaaaagaccgcttttttctcactgtcataaaatgggctaccttcaatttgcagcttcaagcgtactggatatttaagcgcaaaggctttaataacagcgcttgaatcggctcctaacactaccacatcacgcttatctgggcctacatttacacttaggtcatttaccgcaaaatcaacaggtaagcccattaatttaatttgctcactcaattttggtaattgatcagcaagggctgcttcaatttctgaattggtaaacgagtacacagacataccttgatttgtacttttacatgcacctaaaaataagcaggtaagtaataataaaattctcattgtttccctcaaaaaacacggaaaaaaaccgctataaaaagcggttttattcgttaaattgcaaatattgctttaagccttgctagtgtgtcagcagaaactgaaccctcactgactgcaagtaattgctttaagtaataataaacatcggctttttcaccacggtgtttatcatctaacatcgcaacttgttctgtcatacgtaactgactatcagcagactcaacacctgcaagaatctcgatacgtgttaagagctgctcagcagttaagctagtcgttaatgaagcttggaattgcgacggaagctcactgctgctctcaagagctgcaaacaaagccgttaacttagactgctctgcttgcttactaataaccttcgttttttcgctaattgctgactctaactgagccactcgagcagacaacgcttttgagtactcaagtcctgccaatttcaccgttaaatctttaagctgtgcaagatgcactacactctcaagggcagtttcaagttcagttaactgctcagctacaacttcatcattttgctgttgtacttgtttttgctgttcaaactcagcactacgcttggcaaatgtgtcgtcgttaacacgtctgaattgttgccataagttgttttcagctttcattcccgcaaagccaattgtttgccaagtttgttgcaatgctttgagctcttgacacgcagcagccaaatcatcactttgagataacagtgttgcttgttctacaagtgcggctttttgctcagcatttgctttatgaaacgcaactaattggccttgtacttgtgattgcgcagctttgaattgcgcttgtagttcacggtatgttttagggtcaacattacccgcagaacgccatgctttaacaacacggttaaacttactttcaaactgtttccaatcaaattcaccagattcagtatcaagttcattgagttgctgcatttgcgcaataatatcaacacgctgtgctttagcttgctcacgttgctgctcttgctctgcaaaatactcgcgacatggggcaaacaatagttcaatctgttgatcgaataactcaccttgttgtttctctgcatccgtatctaaacgacctaattcattccaacgacgacgtaactgtttaacttgttcagcacgttgtttagggtctgtacactcgattgcagcaagttcattgacttcagcaagtaatgcatcacgctttggcgctgatgcatatttttgccaatcttttgcttctgctaattgggcttctaaatcagcttttagactatttaaaggctgtttatagtaatctgtaagtgtgtcgtataactcttcaaagcctttaaacactccaaacgccacattgaaacggccttgttcaatcaaacgcttcacatcacgggctttgcgttttgctgtttgttgattcttttcaaacttatttgtcagcggtgccattgcttgctgccagctgtttactgcttcagctaaatttgctttaaagcgaccttgtaaacgactcggaatacttgctagttttttgcgagccactttttgctgttgttcaaactgctgctttaagccatcaaactcattttcgtcttcagtcgtggtaatcgcttttaaagcatcaaacgcagctttaaactctgcaatcgcggtaacaagttgtggtaattgctcaacttgcttaaatagatttgacaagtgctgtttaacatcacgaacattttgattatcaactaagtttgcttcagccaaggtatcttttgcttctgcaactttagcctcaagccaatcttgctgaatttgctctggcgtttctaaacctaattgcaatgcgttttcaatttcttcgccaatagcttcaagggttgcaagggctagtacctgacgctgttgctcagctaatgcttgctgcattgcttcatgctctttgcttagtgttgcaatgtgagcttcaagcttttgggtaatcgtagagtattttttatcaagtacgcttacttgctcatcactgagccattttaactcgattgcttgccactgttgtaatagctcagcatgttgcagcgatactagctgaaaatcatttttatcacgaagcgcattcaatttcgccaatataacgcgagtatcagcttcgacttttgcaggcatttctactgctaaacgttcattctcaagatgagccgcaagttgtgtatgcgcttcaccttttgcatgttttagtagtggcttggcaagttggtggttaatgacaagctcaacaagttgcaattgtagctcttcgcggccttctttaaaggctttatcaattaggcttgggtttgctaaacgctttaataatttaacacgaacttgaatttctttttctgcaaatgctagcttttcaagggttttcactggcgcataacgctcaataaactcgtttttaatactcgcgtcaagtttgctatcagtattcaaaacagcttgattaatgtgctgctctgcaatttctttaagtgcttggtcttgcttgtatacttgccaccataaaacaagatcgttcactttattcaaggcttttttacggatctcagcggagctatcttcaagggcaatactatttaagatgctaagatcacgttctgtatcaaggcgttcaactgctgctaaacgaacctgacttttagggtgtttccattttggagtaaacaggtgtttaaagatcattttcactaaacctagctatttcattttctgatgcgaattctttttgcaattgagctttactcttttgcaccatttcaccatttgcgccaatggtaaactgctcattggtttgcgaaactttagcttggtaaagcatcacgagttgaactgtttgttgtttttgctcttctgataatggagtgccatcaggccatttacctgtagacgcaccatactgaagacgttcaaatacttccggggtgatatttttaacaatatgatcaatattcatgctactttttcttttttaaaacaactaaatagatacggcacactatataccatacaaaacctactgccattgctgtcgaataggcataccactcaatagactctgtttctggatgcataaagtaataacagaaaaagccacctaaaaataatatcagtgcgaggaaagactgattcataaacttttgctgtctacgaatacgcgtttctttttgcatttgctgcaactgctcattgcttagatcggtgacttggcattcacaatgcgggcattgtttatgtttgtcagatattgattttgcacattgcgggcaactaataatcgccatatctttctccatactacgcataaaaaaggcgcctttaggcgccctttattgtacttgttttatgagtcgatgtcttatttgaatttcattcatttgtgaagattcgaaaacctatacaactaaattcacgacaaatactcaaaaagctgatttattgtttctgtttcgccttttcagctagacgcttttcccagaaagtcgcatttttaatgcctaatttaactgggtcaaagatgatttcaccacccgctttcttttggtcttcataatctcgtagacaattaagagcaggtttggcaacaaagaaaatagctaaaatacccacgatgttgatccacgccattaaaccaacaccaatgtcaccgatattccagatataacctgagctatttaccataccgtaagccaccataaacataatgacgaacttcacaacaaccagtggaatattacctttaaaataacggtttaaataagcaacgttagtttcagcaatatagtaataagcaagaatggttgtaaatgcaaagaagaataaagcaataccaacaaacgcttcaccaaaaccgccaaatacactaaacagtgccatctgagtaaatgctgctgagcctacttcagttgcagcatcaacattttgtacaataaattgacctgcaggtaactcacccacaatattgtattgtttagtgattagaatcattagcgctgttgctgtacaaacgaaaatagtatcaacataaacagagaatgcttgcactaagccttgttgagccgggtggtctacttcagctgcagatgctgcatgcggacccgtaccttggcctgcttcgtttgaatagataccacgtttaacaccccaaccaatcgcagcaccaaaacctgcttgcgcagtgaatgcatcagataagatcattgagaaaatgcctggcactttatctaagtttaagaacaccacgattaaagctaacacgatgtaacctagcgccataaatggcaccacaatttgtgtgaagtttgcgatacgtttaatgccaccgaagatgataaacgcaagtacaattaaaatgattgcaagggcaactagcttaaagctacctacttcaccaaagctggtgctaaccaatgtgccttcaccgaagacttgtgtgaatgcattacccactgcgtttgcttgtacgccaggtaagaaaacaccacaagcaataatagcggatagagcaaataacactgcaagccacttttgttgtaaacatctgtcgaagtaataagcagggccacctcgatactgaccatcttcttctgacttataaatttgacctagcgttgattctgcatatgcagtacttgcgcctaaaaatgcgacaatccacatccaaaaaatcgcacctggaccaccaaagccgatcgcagcagcaaccccggcaatattaccaacaccaacacggcccgataatgaaacagccagagcttggaatgatgaaattcctgtatctgagttattagaacttagcaataacttacacatttctttgaaatgtcgaacttgcgcgaaacgggttaaaacggaataaaacaggcctgcacctagacataagtaaatgagtgcactactccaaattacgtcattgacggcgcttacaaaagcttccatggatatcctctataattatattttttattgatagttacgatgctctgcgttagcgaatgagaatgcgcgacataatgatctgagaattaatcaaaaataatcttctctcagctagatgtactgaatattaacttaaacaacctaactttgttaacagttaattttcaatatgacaaatgtgctttgtattagtcaaccaaaaaaaacgggcatcaatctgattgatacccgcaaaatttgcttaatgttgttatcttaatttatcaacaacgttaacaatagccgctaacgtatcttgaccaaactgatatgaacgacggtcagaccagccgtaatcagggtctggtaaatcatcgttatctttaaatggcatctctaccgtatacgctaatgcattaaactcatgcgctacagctgaagaacctaccgttagattagcctgacctggctcatcttttggataaccgtgttcgtcttggaactcaggcgttacagttaaaagcgcagctttaaagctatcttctaactcttttaaacgatcatcgtaacctggaataccttcgctacccgcaacaaagttataaggaatagcttcgtcaccatgaatatctaagtgcatatcaaggcccgtttcacgcattttgttaagcactaaaaatacttcagggctattttccatgcttggtgtttgccattcacggttcaagttaacgcctttagcgttagtacgtaagtgaccacgcacactgccatcagggttcatgtttggcacaatatagaacactgctttagataatagtgccgctgcatgtgggtcttcgtcatcaagtaatttatgaagtaaaccttcaacataccactcagccattgtttcacctgggtgctgacgtgccgtgatccagatttttttcttttcactgctaggaataccgacacgtaatacactcatgtcacgaccatcaagagtttcacctaaagtttctagttcacacgcatgctggctttgtgcccatgctaataaatcaaggtgacggtcatagctatatggtgcgaaataagcaaaatacatgctgctgcactcaggctcaacttcaaatgataatgtaccgtttgcatattcagatggaacacggaaccaagtttgacgatcgtatgatgcaaccgcatgataaccatcccagccatcaggatacgctgagttttctaggttattaatgtgtaatttatggttttgaaacgcggttgtttcaagacgaaagtgaaaccactggaaaaaatcagactgattgtctttattaatttctaattgaatattcagtggatcaacggcttcaataaccttgatattaccactatcaaaattgctggtgattttcattctataaacctattggttaaaaataattcttagctattcgtttgtaagttaagaattaagtcaacgccctaccgttagaacgtttcgttagtaatatggtgtagacccttaacagcctaccacatgctgaaaatttgcaaaaactttcacgactaaaaaagccagcataatgctggcttctagattctttatagcttaggtattagcgaggtaaacttgggaaagttacttcagccatatcacgcatacaacgtactacctgacagctataaccaaactcattatcgtaccaaacataaagaacaacacggttgtcatctacgatagtcgcttgtgagtcaacaacaccagcgtaacggctacccactaagtcagtagatacgatttctgtagacgctgtgtaatcgatttggtcacgaaggtctgagtaaagtgctgtttcacgtaagaacgcatttagctcttcaactgtagtgcctttttcaaggtttaagttcaagattgccattgatacgtttggtgtaggaacacggatagcgttacctgtaagtttaccttcaagctcaggtaaagctttagaaaccgcttttgcagcacccgtagacgtgataaccatgttaagtgcagcagcacgaccacggcgttcagctttgtggtagttatcaattaagttttggtcattggtatacgagtgaacagtttcaacgtgaccattcttgataccgaacttatcgttaagcgcttttaacgttggggtaatagcattggttgtacagcttgctgcacagacaattttatcttcaggtttgatatcttggttatttacaccgtaaacgatgttcttgatgttgcctttagctggtgcagttaataatacttttgctgcgccttttgcttctaagtgctgaccaaggcctgcttcgtctttccagatacctgtgttatcaacaacaagtgcattctcgatgccgtaagctgtgtaatcaacttcacttggtgagttagcgtagataacttgaatgtagctaccgttagctttaattgcattacgctctttatcaattgtgattgagccattgaatggaccgtggatagagtcacgacgaagtaagcttgcacgcttttctaggtcgccgtctttaccgccacgcacaacgattgcacgtaaacgtaggtctgcataaggacctgacttttcgattaatagacgcgctaataaacgaccaatacgaccaaaaccgtacaacacaacatcacgtggttctttacgctctgagtttgcgatttctgcaagttcgtcagttaagtactcttcaactgaacgaccttttgcagcatcgttaaacaaataaccatacgctagtttaccaatatcgatacgtgcagaatttaaatccattttgctaattgcttctaagaaagggaagctttcacgtaaacgtagttttgtaccttcaaactgagcaactgttttgtgcgctttgatgatatcgattgtactggcattaacgagaggacggccatatacagcgatttcgataccacgattacggtaaagtctaccaatgattggttgcatactttctgcgtaatcttgacgttcttgccagctgcttgtgtattctaactcgtgagatgaggtcattttttttacctaattaaacaattttgaacggatagcctttgaaaatgtgttgtgatttgagagcaacacatcttaggcacggctattctaatttaaactcaaatgattctccactgttacagaacaattcattgcgctagaataaagtcgtaattattaagtcgaggttaaggaatgttattaagagcaagcgtgttgcttggtttattggcgttaacggggtgtgaagatccgcttacactggcaaaggtatgcgaagagactcctggcttttgcagtgatttaaataaagacagtcactgtaaagagcaacgtgccgaggtcatcattcagcgatatgttgaatataagtcaccaacagacgaaaacaaataccagttattaaaagatttcgagaaatacgatcagtgtgtatcgctcgctgccaaaattgagcatataaaactaaaagaaaaaacgacgtctcgtgttgaaggtcatttaaccagtattaaagagatgacacgtatcttccaagatacaaaaaacacaaatcatccaggtttgttgtattaccattggtcacgtaataacgatcaatcagcgttaacgaaacttctcgcccttgaagaaaaacaagataagcgcgtaactgaagatgcagaaatgcagtttttcttagcaagctactacgttaagtttgatgatgaaaaaaccatagacttgctttacaaaacgctagaactgaataaagcaggtgaaacacccaaccctgaaatctaccctacacttgtgagcttattctacaaacatgaaaagtataagcatgcctacacctttgcacgtgtagcacaattatctgggtatgaagatgtcgatattttacctatcgagcatcaactcgctgccgcaggtaaaagcctggacagcttagatgatttagcgcaaaaaacctacgatagcatccaagcgggaagcttcgtatcaccacgcgggttttaataaattcgctagtgcagtgcttagacaaataaaaaaggcagctaacgctgccttttcttattttgctttgcttgtgccaacttctacacgagtttttagcttttgacctggtctaaaagtcactactcggcgtgccgaaatagggatatcttcacctgttttcggattgcgacctggacgttctttcttatctcgaagatcaaagttaccaaatccagagagctttacttgctcgcctttttctagcgctgagcggatttcttcaaaaaacgcttcaactaaatctttggcatcttttttattgatcccgagtttttcaaataggtgttcagctatgtcggctttagtaagcgccatatctagtccctcaacgatgcgttaaattgttcggccaatgcggccaccacattatcaactacttgattgatatctttctcttcgagcgttctatcaaccgcttgcagtgttagagcaatcgccaaactcttataatttggctcaatacctttgcccttatacacatcgaataagtttaggtcaaccaattgatttccgccaactttttctattacatttaaaatatcaccagattttacgtgatctttcactaaaatcgcgatatcacggcggtttgacgggaatttcgagaccgttaccgcttctggtaattttcttttttcaagggctgacatttcgatttcaaatacaaaggctgtgttattgatatctagtaacttttgcacttgtgggtgcacagcaccaaaaaatcctacttttttaccatcaacataaataactgctgattgacctgggtgtaagccatcagactgctctgcttttatctcaaagcgtgcaatatcgttgctaattgctaaaagtgcttcaacatcgccttttaagtcataaaaatcaacgctacgcttttcttgaacccaatgttcgccgtgtgcaagtccagagattacaccaccaatcacagcaacttggtttacgccgttttcagcattctcgtcacgtaagaattttaagccatgctcaaataaacgtacacgtggttgttgacggttttggttatacactaacgatgctaatagacccggcattaagctcacacgcattgctgacatttcaactgaaattgggtgtggtaatacaagcgcatcactttgtggatgtaaaattgcttgtgcttttggatcaacgaagctgtaggtaattgcttcttggtaaccacgtgttacaagcgtattgcggaatttagttaccgcaacatgtgactcgtcatggttagtcatttttaatttagctgttggtgcaacgtttggaatgctgttatagccgtaaacacgtgcaacttcttcaattaagtcttcttcgatacgaatatcaaaacgatagctaggtacgtcagcgctccatacaccatcaacaattttcacatctagacccaagcgcgttaggatgtcagtgacttttgcatcatcaatatgatgaccaattacacggtctaaacgctcacgacgtaaacgcacttctgtcacttttggtagtttatcagttgctactgcttcaacaacagggcctgcttcaccgccaacaatctctagaagtaatgctgtagcacgttccatcgcatctttttgtagcgcaaaatctacaccacgctcgtagcggtgtgatgcatccgtgtgtaagccgtagctacgtgcttgaccagcaatcgctaccgggttaaagaaggcactttctaataaaatatctgacgttgactcagtcacacctgatttttcaccaccaaaaatacccgcgatagcaagtgctttattgtgatcagcaataacaagtgtagattcatttagtttcgcagtattgccatcaagaagaacgatttcttcaccaggattagcgctgcgaactttaataccaccttcaatcgcatttaaatcaaatgcgtgcattgggtgaccaagctctaataacacgtagtttgtaacatcaactactgggtcaattgaacgaataccactgcgacgaagtttttctaccatccaaagcggtgtttctgcatcaaggttaatacctttgattacacgacctagataacgaggacaggcatcatcattaacaagttcaatggatactttatcttcaatcgtcgccgcaacaggggcaatctcaagattgttaacatcaatactgttcagtacacctacctcacgcgctagacctttaatacctaaacagtcaccacggtttggtgttaggtcaacatcaataatgttgtcgtctaggcttaagtactcacgtaagtcagtgccgattggtgcatcacttggtagttccatgatgccatcaccttcttcgctgatacctaactcaacgaatgcgcacagcataccgtgagatggttgcccacgaagcttggcttttttgattttgaagtcacccggtaatacagcgccaactgtcgcaacagctacttttaaaccttgacgacaattaggtgcaccacaaacgatatcaagtagctcatcaccacctacgtttactttagttacacgtaatttatcagcatcagggtgttgaccacactcaaccacttcaccaactacaacgcctgtgaactcagccgctgcaggctcaacaccgtcaacttcaagaccagccattgataactgttccgaaagagcctgtgtgtcgattgctgggttaacccactctcttaaccacttttcactaaatttcattttatatcttcactcttaacggaactggtttaggaattttaaatcgttttcgaaaaatgcacgtaagtcgtttacgccgtaacgcaacatagtcaagcgctcaacacccataccaaatgcgaagcctgtgtatttttctggatcaatacccactgatttaagaacgttagggtgaaccatgccacagcctaatacctctaaccacttgccgtttttacccataacatcaacctcagctgatggctcagtaaacgggaaatatgaaggacggaaacggatttccatatcttcttcaaagaagttacgtaagaaatcgtgcaaaataccttttaactcagtgaagcttacatctgtatcaaccattaagccttccacttggtggaacattggcgtgtgagtttggtcataatcgttacgataaacacgacctggagaaatgatgcgcaatggtggctgctcagtttccatagtacggatttgtacaccactggtttgtgtacgaagcacaagcttagggttgaaatagaaagtatcgtgatcagcacgcgcaggatggtgctcaggaatatttagcgcatcgaagttatgaaaatcatcctcaacttctgggcctgatttaaccgcaaaacctaactcaccaaaaaagctttcaatacgttcaattgtacgagttactgggtgtaagccacctgttggcataacacgacccggtaaagttacgtcgatcgtttctgcagctagtttctcttcaagagccttacttgctagtaactcacgcttttcgttaatggctgtttgtacttcttgttttgcttggttaatcacttgacccgcttctttacgctcttcaggggcaatcttacctagcgttttaagtaagttggtgatttcaccttttttaccaaggtaattaaccctgatatcttctaactgcgcgatttcattcgcactggcaactgcctcaagtgcttgcgctaaaatattttctaagttcattgagtacctggtctttcacagaaggattttgtaatagctaatgataactgaaagcaaggactagattctagccctactaaagctttaacgttgattttataaagggaattgttaattttctttgtgcggccatcgaggtaatgattaaaatttataaatttgaactaaaaattaatttcttcatcaagtatgcatagaattttacacagcttgatgttaggttaagaaaaagatactaaaaaggaactttgttatgaatatcattactaaattcaatccattattaatactaccactactaataactactacatccaacgccgctaatataggcacttcttacgataaaaccacagatagtaaaaacttgtcagtttttgatgtaaatacaacttcagtaacaaaaaacagcaatacgaaaataattggtatatacgaagattcaattgtttattctgtttcacaacaaggcgatggagatacatttcgcgaagacatatggttttacaacagaaataatcagcagtctactccgataggagagaagtttaaaaactatgcacctaaggttgtaggttacgttaatataaatggtaagaagtttatatttaacgagttaagtgaaaatgaccagtgtgagctcatattacttgaagaaaataacactaaaaatttactaagagacgtaagttgtaactcaggtagtttagaagttaatgggaacaatttatacattgcaaaaacacgcttttattatgacagactaagaagcttcgacacttatgaattgtatgatagaaaaggatacaatattgatgggcttttgattcattacaacttttctacaaacgagtctcaagaagtcatctacactaatattggaagatcatccctaccttatgtttcggaagtaattacttcaggctcttatgtatatacattccagtgtcaagtgaaatcaggctgtaagaatgggaattatggtgcttttaacagatatagcaatgactttacttcggagctgactctttcacgtcaaaacggcgacaatttacttcacattgcttcaaaccccacagctgactcagtttatatatatgatgaaaacaaattatatggtaataatcggctaatagtgtcaaaaaacgagtcttctttcgatattattgaagatacaaaacccgccagaacatcaaatataatcagtgctggagtaatggacaataaatttaggctgctaaatatatctacagatacacagttaggtgaaacaatattagaattagcgacttttgacgatgaaagtcaatctttaataagtacgaaggttgctacaaataacatcattgatgctaactctaaaatttctaataatgaagcatttatcatcgatatccattctgacggcacaagaggcctaaatcttctttctttagatggcactatacagcatctatttaaacttcccgcctcatcaaactacgcaataaatattttagataccgattcaaattcaattttgttttcacaaaatggatattattgggaatttgatagaaactcagaaaccttgtcacaaattgagttaaaaggagaagaaacctcaagtgacagaaactcgagtttagaaaatatagtaccatttgattttgcaggtgaaaaattctttctcatagcgacggataaccctaattacaatttgtggtactatgattctgtagcaaatactgtaaacaaacttagcgatgccgtgtttactgatgctttaccagaacaaagtcaaaataaccttcttatcctaaaaaacaggaatcaatttacaacgtttgacgttaatacaaaagcattcatacaacatgaagtattgactggattaaaacaaatttctccagttcatttcagcgaaaatttcacttttatctctgaaagctcagatggcttaattaaaaaatggaagtacgattgggatactaaagaattagacgagctagaaacttacaataataataaaatcagatacgcttcaatagattacgtttggtttatgcaaagtgaaacgatatatgcgtacagcaaaaacgatttgactctttatgaattaattgatggcaatatcaatactgttttctctgctgaaaaccaaggtataactgacaactttagatgtgaaaattgcatttataaacataaagatagagtctacattttcggtgcacagtggtattacaatttttcatcaacagataatggggagattaacttttatggctctggtgagaaaaaagagccaattacgaatgcttttagtcataacgaagacttatacttcatcccacattcgttcaacagtatttacaagttagaaaatgatactgatgaagtaagtaaccttcctttgcaaaatattaatggcgacaaaataatttcaattcctttcagttcaacacttaaagtaatatcttttcataatcgaaatataaaaacctatgatatttctgaggacttctcaaaaatttctgaagtttattcaaacaataactttctagaagttagcttaagttctatagactcagttgtaaataatatttctaagctagttctgaatgcagaagatgctaaggttaataacacctatataggaagagaattagctattctgaacctatacacgtataaacttgctgattttgttaatgaaatgccagaggaatttgaactttctactgatgaagagtttgagtttattccaacaatagagcaaccaacctctcttccactaagctttactataatgaataaccctgaatggttaaaagtaaataaagagtctggggtactctttggaactccaagcgataaagatataggattgtttagtaatataaagttggttgttgataatggttttgacacatacacatggaattttagtattgatataaaggcaagtaacaacactattattgaagaacccaaaaatagttctggtggctcaatagggattctgttgttccttattttggctgcactttatacatgcaaaaaaattaaccttaaggtttttagaaagtaaattaaagtcatgttcggctatttaaagccgaacatgaaaaataattactatttggtcataattttaacgttgattttataaagggaattgttaattttctttgtgcggccatcgaggcatggtcaagtttgtctaaaacatcgagtaaagcgcgcatatcacggcttaatcgcgttaataaaaagcgcgcgcattcatcggtcagttcaagaccacgcatgtgtgcgcggcgtacaagtgcctctgctttatcatcatcactcattgagcgaatttgtaatgtggtaccccattttagtcgagatactaagtctggtaagtttatatgcaacatatcaggcaatagatcggctgttacaacaagatatttaccaggctcgttaaagcgattaaaaaagttaaatagccccttctcccatgcatcattacctgccactaagtgcacgtcatcgatacataaaacgtcaaggttttcgaggccttcgagtaccacagggccaaaatcaatcacctcgcgcatcgacagtaacatcgtcgataaaccatgctcttgagcatgaatacaagtcgcgtataagagatgggatttaccagaatcacctaagccgcataagtaggtatattgaaacttattattgagctttgtgaacgcatctttaagatgactgacttcaagcgagttctcaccaccaaagtaagatgtaaatgtttcatcatcgggtaatgtaaccggtaatgccatttgcataggttcttgcacgtgttttaaagcccttgccactgatattctaactcatcacctgttaccacctgataaaaatcacgaggatcttgataagctttaaacgcactgtctaactcgagagcttttctgaaatcattcatactgccagtatgatttacagtaaactgtacagtatcaggttttcggatagtgatttcagctcgagttacaacacttaaactttctaaacgacgttttgcaacttcaatatctacaaagttatcaataccttttaggtaaaatgttgcagttgcaagctggccaatcatggtagggtcaatagcatactcttgtgctaaaccgcccgctaaattatcgaccatatctgcaacaatttgttgcttatcaccaactaatcgatttgtttcaaataattctgcatttgtaaaacgccaatcaagcacccaagtttcagaatcttgctgctgatacattcgagctgtgatactacgctctgcactgtaacgacttgatgcttgctctactggttcagaaaaatttccccatacttcgggtatgccaacaatagaacgatcttgcaaatcaagtaatggcacaaccacaggcaagccacgtctgtctgccttatcatagattaattgctcaagttgtgggtaactttcttgcgtaacgagctcacgtcgccaattatcttctatagctaaccagatagctactagcggacgtcgtgttccccataaaggcagatttaaatcctttattaatgcattaattttattagcttcaaacttaacaaccaagtttaaagtaccatctggcttttcatcatattcaaacttaagcatatagtctgaaatatcgcgggtacgctctttggcaacagggttttgatctgctgatgtatcacccgtcactttaaccaatacattaagaagtgcttcacgactagcagctaatcgagcatctcgcgatttatcagcaactttcagagtatcttggtatagattagtcacctcaactgcaaaagttgaaacactagaaaaaaataataataaacaaataagtaatctagacacaggccattaattcttgcttttaaactggtttgatcctaaatcaaagccataaacaaagcaaagttaatttaatgaacgggagatgagtgagtgatgagttagttagcgagtagcgagagtaacgtttaaagcctgacgtaggttgaacagggcatctgaagtggatagcttaaacgcaaaaaagcccgactctttcgaatcgggctttctttaatttggagcctggcgatgtcctactttcacatggcaaatgccacactatcatcggcgctgtttcgtttcactactgagttcggcatggggtcaggtgggtccaaaacgctattgtcaccaagcaaatttggttttaattcactcttttgagcaaattaataaattcggaattctgatatcaagtaaatgtctactttagtgtcttaacttctgtctgttacgctgtcataaaacgcgtttggcgttgtatggttaagcctcacgggtaattagtacaggttagcttaatggctcgcaccacttccacaccctgcctatcaacgttgtagtcttcaacggcccttcagagactttaaaagtctagtgagaactcatctcgaggcctgcttcgcgcttagatgctttcagcgcttatcagttccgaacgtagctaccgggcagtgccattggcatgacaacccgaacaccagcggttcgttcactccggtcctctcgtactaggagcaacccctctcaattctcaaacgcccacggcagatagggaccgaactgtctcacgacgttctaaacccagctcgcgtaccactttaaatggcgaacagccatacccttgggaccgacttcagccccaggatgtgatgagccgacatcgaggtgccaaacaccgccgtcgatatgaactcttgggcggtatcagcctgttatccccggagtaccttttatccgttgagcgatggcccttccattcagaaccaccggatcactatgacctactttcgtacctgctcgacgtgtctgtctcgcagttaagctggcttctaccattacactaaccgtacgatgtccgaccgtacttagccaaccttcgtgctcctccgttactctttgggaggagaccgccccagtcaaactacccaccaggcactgtccgtaaccccgattaggggccaacgttagaacatcaacactacaagggtggtatttcaaggacggctccacaaagactagcgtctctgcttcaaagcctcccacctatcctacacatgtagggtcaatgttcagtgccaagctgtagtaaaggttcacggggtctttccgtctagccgcgggtacacagcatcttcactgcgatttcaatttcactgagtctcgggtggagacagcgtggccatggttacaccattcgtgcaggtcggaacttacccgacaaggaatttcgctaccttaggaccgttatagttacggccgccgtttaccggggcttcgatcaagagcttcgtccgaaaactaaccccatcaattaaccttccggcaccgggcaggtgtcacaccgtatacgtcatcttgcgattttgcacagtgctgtgtttttaataaacagtcccagccacctggtcactgcggctcccgtccgcttagagagcaagtctcatcacagataggagcgtaccttctcccgaagttacggtacgattttgcctagttccttcacccgagttctctcaagcgccttagtattctctacctgaccacctgtgtcggtttggggtacgattcggtataatctgaagcttagaggcttttcctggaagtatggcatcaacaacttcacacccttaggtgctcgtctcgtgtctcagtcttagcaacccggattttcctaagtcaccaacctactcactttcacatggacaaccaacgccatgcttgtttagcctgctccgtccccccatcgcaattataccaagtacgggaatattaacccgtttcccatcgactacgcctttcggcctcgccttaggggtcgacttaccctaccctgattaacatgggataggaacccttggtcttccggcgtgcgggtttttcacccgcattatcgttactcatgtcagcattcgcacttctgatacctccagcaaccctcccgggtcaccttcaacggcttacagaacgctcccctaccactcatacaaagtatgaatccgcagcttcggtgcatagtttagccccgttacatcttccgcgcagaccgactcgaccagtgagctattacgctttctttaaagggtggctgcttctaagccaacctcctggctgtctgggcctttccacatcgtttcccacttaactatgactttgggaccttagctggcggtctgggttgtttccctcttcacgacggacgttagcacccgccgtgtgtctcccggatagtactttacggtattcggagtttgcaaagggttggtaagtcgggatgaccccctagccttaacagtgctctacccccgtaagtattcgtccgaggctctacctaaatagatttcggggagaaccagctatctcccggtttgattagcctttcactcctagccacaggtcatcccctaacttttcaacgttagtgggttcggtcctccagttgatgttactcaaccttcaacctgcccatggctagatcaccgggtttcgggtctataccttgcaactatacgcccagttaagactcggtttccctacggctaccctaatcggttaacctcgctacaaaatataagtcgctgacccattatacaaaaggtacgcagtcacccaacaagtgggctcctactgcttgtacgtacacggtttcaggttctatttcactcccctcacaggggttcttttcgcctttccctcacggtactggttcactatcggtcagttgggagtatttagccttagatgatggtccacctatattcagtcaaagtttcacgtgctccgacctactcgatttcacttaagatgcattttcgtgtacgggactatcaccctgtatcgtcaaactttccagaatgttccactaacacataataagcttaagggctggtccggtttcgctcgccgctacttccggaatctcggttgatttctgttcctacgggtacttagatgtttcagttctccgcgttcgcctcttacacctatgtattcagtgtaagatacctgcaagcaggtgggtttccccattcggaaatcctagtctcaagcgctttttactagcttgactaggcttatcgcaagttaatacgtccttcatcgcctccaactgccaaggcatccaccgtgtacgcttagtcacttaaccatacaacccaaacgggtctttgttagtgacagctgttaacttcgccagaagttaattcatcaaataatgatgagaatactaaagtagataccgattaatcattgctgattaactggcatatttttacttttgaaaactctttatagatacgaatatctataagaattttaatatcagctttccaaatttttaaagagcatattaattagttaaaccaaacggtttagctaactaacaatcatctgtgtggacactacgaacaaataagttctaaatcgtataaggaggtgatccagccccaggttcccctagggctaccttgttacgacttcaccccagtcatgaatcactccgtggtgaacgtcctcccgaaggttagactatccacttctggagcaacccactcccatggtgtgacgggcggtgtgtacaaggcccgggaacgtattcaccgcatcattctgatatgcgattactagcgattccgacttcatggagtcgagttgcagactccaatccggactacgacgcactttaagtgattcgcttaccctcgcaggttcgcagcactctgtatgcgccattgtagcacgtgtgtagccctacacgtaagggccatgatgacttgacgtcgtccccaccttcctccggtttatcaccggcagtctccttagagttcccgaccgaatcgctggcaactaaggataggggttgcgctcgttgcgggacttaacccaacatctcacaacacgagctgacgacagccatgcagcacctgtatcagagttcccgaaggcaccaaaccatctctggtaagttctctgtatgtcaagtgtaggtaaggttcttcgcgttgcatcgaattaaaccacatgctccaccgcttgtgcgggcccccgtcaattcatttgagttttaaccttgcggccgtactccccaggcggtctacttaatgcgttagctttgaaaaacaactccgaagagtcgagcttctagtagacatcgtttacggcgtggactaccagggtatctaatcctgtttgctccccacgctttcgtacatgagcgtcagtgttgacccaggtggctgccttcgccatcggtattccttcagatctctacgcatttcaccgctacacctgaaattctaccaccctctatcacactctagtttgccagttcgaaatgcagttcccaggttgagcccggggctttcacatctcgcttaacaaaccgcctgcgtacgctttacgcccagtaattccgattaacgctcgcaccctccgtattaccgcggctgctggcacggagttagccggtgcttcttctgtaagtaacgtcacagctaagtgctattaacacttaacctttcctccttactgaaagtgctttacaacccgaaggccttcttcacacacgcggcatggctgcatcaggcttgcgcccattgtgcaatattccccactgctgcctcccgtaggagtctgggccgtgtctcagtcccagtgtggctgatcatcctctcaaaccagctagggatcgtcgccttggtgagccattacctcaccaactagctaatcccacttgggctaatcttatggcgtgaggcccgaaggtcccccactttggtccaaagacatcatgcggtattagcagtcgtttccaactgttgtcccccaccataaggcatattcccaagcattactcacccgtccgccgctcgtcagcaaagtagcaagctactctctgttaccgctcgacttgcatgtgttaggcctgccgccagcgttcaatctgagccatgatcaaactcttcaattaaaagttttttctgtcccgaaggacatgctcaatgaattctgaattttgatatctttcgatatcgaattgactgtgctgaaacaagtaaacttgtttccgttggtcactcagttaaattgagactctaaatttgtttgcgtcatctagcgaactagaatctgctgttagaactcaatctgtacgagtgcccacacagatgattgctttatattgttaaagaacgtttcgagttgctttcgcgtctcgagggatgcgtataatacatccttaatttttttagtcaacacttaattttaaactttcttttagaccgttttaaaccgaagttttacttaactccctgtcactttgttcagcgcttttcattgctgcccgccgtgtcagtggatgcgcattatagggatgcgaagaattaacgcaagcactttttgaaggtttttttgattattttcaaattaatcagatacccaccaaatgcaaacatgttacccacaaacaactgtggataactgatgatttttagcagaataactaaactctccgcgcttgttatggtaacttgcgccgcagattttccactcgctcacaaggcaagaaaaatgacagacattataaatagtataagtagtctcctttggggtcacattttggtttaccttttaatagctgcggggctatttttcactcttcgactcggttttatccaattcactcaatttccacatatgatcaaagtgatgtttcagagccgccaaggttctggtgagggcatttcttcattccaagcattttgtacttcattagctgcgcgagttggcactggtaatatggcgggtgttgctgttgcactttatttaggcggtgccggtgcaattttttggatgtggcttattgctttaataggtatggcgacaagttttgcagaaagtacccttgcccaagcatataaaacggtcgatgaagatggcaactttcgtggtggccctgcttattatatggaatatggattaggtaaacgttggatgggagtcattttctctctttgccttattcttgcttttggtttggtatttaatgcagttcaatcaaactctattgctgctgcatttgatgttgcgtttgggattccaaactatgttgtcggaatcgccttggtattagggtctggcattatcatttttggtggcttaaaaactatttcacgttttgcagaaatggttgtgccatttatggcgctggcttatttgctagttgcactctatgtatgtgccatgaactacgatttactaccaaatgtgttcatgcatgttattaatagtgcctttggtatcgagcaagcaggcgctggtgcaattggttatggtgtaatgcaggccatgatccagggtattaaacgtggtctattctctaatgaagctggtatgggtagcgctgcaaatgctgctgcaacggcaacacctaacccaccgcacccagcctcacaaggttatgtgcaaatgctcggtgtatttgtagatacaattattatttgtactgcaaccgcagcccttattttattatcacaacagcttatacctgattcaggtgtgactggtattgcattgacgcaagctgcccttgaagaacatgttggtagctggggagcaacctttgttgcgattgcaattttgttttttgcatttacctcgattgttgctaattattcttacgcggaaaccaatttattatttttagaacataaccatgcatcgggcatgttgatcttccgattattagtacttggtatggtgatgtttggtgcgctcggcgaattacctttagtatggacgcttgccgatatttcgatgggcttgatggcaattgttaacgtcatcgctttatttatgctttcgggtgtcgttatttggcttgcgaaggattacaactcacaacgtaaagcaggtaaattacctactttcgatccttcgcaaaacaaaaagctcgatcaaactattcctaaaggcgcgtggcgcaaataatcaagccaaatgattacttaattggggagcgattgtgctcccttatttgtatttgctaatttttcaaaaacagacaatatgaatgtgatttgctgttcgttaagtttggattcaagctgtgtaacaagctgctcttttatttgcgcttttaatgcttgtttttgctctgcagttaataatggctgcgattgttgctgatatgattgcacggcggtgagcatagccatcaccacgtcattatcaaagtcggttagcgctgctttggcattactaatggcttgttctgatttatcgaagacagtcgatactttatcgacaagcacgctcacctcatgaattttcagtacgtcgttaatgttcgacataataatcgcaacaggaatgagtactaatgagattgctaaacaaagcccaaatactgcgcctacccaaaactgatttaagccacgtttaaattgctccattatctttccttgatcctatttattgattaaaacttgaaacgcgttagctgttttaaaaagactaaggaaactataaagctattttggcaataaaaaaataatttgatgagattataaaaagaaatatatgtgaaatagagaagaggtattttatgtaaatggtgcccggggccggacttgaaccggcacgctgttaccagcgagggattttaaatcccttgtgtctaccaattccaccacccgggcatcgggtcgctcgtaagagcatgtggagtattatatggaggcggaacccggagtcgaaccgaggtagacggatttgcaatccgctgcatggccactctgccattccgccttatcgcttccaaataattggagcggcacacgaggctcgaactcgtgacctcaaccttggcaaggttgcgctctaccaactgagctagtgccgcaaatttgtttctgtcagtgatttgtccgtttctccacaaccttggggttgcgatgataacgttctggcaactgagctagtgccgcaaaatttcaattatttaccactaaaaatggtgcccggggccggacttgaaccggcacgctgttaccagcgagggattttaaatcccttgtgtctaccaattccaccacccgggcatcgggtttgctatttaaagcaagtggataaagctaatatggagcggcacacgaggctcgaactcgtgacctcaaccttggcaaggttgcgctctaccaactgagctagtgccgcatcatattaactctagagttaaatcgtaattttaaaactacatttggtattgtagttaaccacaaaatggtgcccggggccggacttgaaccggcacgctgttaccagcgagggattttaaatcccttgtgtctaccaattccaccacccgggcatcgggttgctcatagagcgcgtggagtgttgaatggaggcggaacccggagtcgaaccgaggtggacggatttgcaatccgctgcatggccactctgccattccgccaaattagataattggagcggcacacgaggctcgaactcgtgacctcaaccttggcaaggttgcgctctaccaactgagctagtgccgctttctttatcttgggggctatgccctctcaacacggacgcattctacagagattattaaacgcgtcaatataaaaaatgctagttttgaactgtttgcttattttttatctaaaacggtgtgtaattatacgcttaggatcaatttttggtcaattctgaccatgctgccattaaatactgcagcatagaactaagcgttaagattgttgcaacgtataaaagaccataacttaagtagatcatccatgtatcaaattgccaaatcaaaccaataatggctagcatttgtgccgcagttttaaacttacccatgttagatacagctacattgtcacgcttaccctgctctgccatccattcacgtaatgcagaaataacgatttcgcggctaataataactaatgcaggtatagtcatatacaaactttgataatggcttgataaagcaacaagtgccgcacagaccattactttgtcagcaacaggatctaaaaacgcaccaaatggcgttgactgatttaaacgacgcgcaagatagccatcaaggatatctgtgattgacgcaagccagaaaacaaacgcagctgcgaaaaacgcccatgagaaaggcaaataaaatatcaccaaaaaaatggggataagaaaaagtctaaaggttgtgagtgtgtttggaatattccacataactacttggagatgtctttttttactatattcgcacgaaggctacgccttgtcatgcaaatgattaaatatcttttcagccatttcagggctgatcccaggaacttgttttaattggtctatattagcagcttttaccccttgcatgccccctaaatattttaataatgcctgtcggcgcttttgtccaacaccggtaatttcttctaataatgattgcgtgcgttgtttttgacgtttattacgatgcccagcaatagcaaaacggtgcgactcatcacgtatatgttggattaaatgcagtgccggcgcgtctgaatcaagtggtattgtttttcgtccaccatcaattaatagcgtttctaaacctggttttcggcttgtgccttttgcaacccccaccagcaatggcattttattatgtggccagttttcaaaatattgttcagcacgagataattgacctttacccccatcgataaagataacatcgggtattttttcttcatcgactactttgttgtagcgtttattaagtgcaaattccattgcagcatagtcatcaccgccagtgatgccggtaacattaaaacggcgatactctttattatttggaccttgcgaatcaaacaccacacaacttgcaaccgtgttttcacccattgtatggctaatatcaaaacattccatacgatttatatcatcaagacgtaatgtttcttttaattgtgcatagcgtttattaattgagtcctgcgtgctttgcttaacactaatgctgttaagggcatttttattagcaagcttaagatactgagctcgctcaccacgattagcgacttttaaattcactttacgctcagaaattgccgtaagtgcatcgcttagaggctcactctcttcgattgtaaacggtaagatgatttctttagcaatgcgccctgttgcaccaggtgctaagtaatactggcctaaaaaggaagttaaaatctcttcttgcccagagtctttgggcactttggggaaataggttttgctaccaagtaccttatgatcgcggatcattaataagtgaaccgcatttaaaccatttaaatgcgcaaagccaaccacatccatttcggcatgattaccggaaatcgattgctgttcctgcattttccgaagtaacataatttggtcgcgtacttttgcagcgagctcaaatttaagctctttgcttgcttgctccattttagcaattaaatcagcaataacttcatgagatttgcctagtaaaaacttacgtacaaaatcgacttcttgttgatattcttcatcggtaattttattaacacacggcgctgagcaacgttttaactgatattgtaaacatggacgacttcgagctcggtaataggcatcttcacattggcgaaccggaaagattttttgcattaaacgcaggctttcagataccgcccctgcacttgggaatggaccaaaatactcgcctttgattttacgactaccacgatgaaaagcgagtcgcgggtgtttgtgatcagttaaaagaatataagggtatgatttatcatcgcgcagtaaaatattgtagcgaggctgatatttttttattaagttgttttcaagtaataaggcttcggtctctgtgttagtcagggtgacttcgataccgcaaatattgcttactaagacacgtgttttactatcagttacattactgcgaaagtaactagttacgcgcttttttagatttttagccttaccgacataaataacttgcccttcactatcaagcattcggtagacaccgggctcacttgatagtgttttaagaaaacgggctggttcgaaatcagacattgagcaaattaatgcgaactatcaatgtcgatcattttgtgacgtattgctaaatgcgtaagttcaacatcaccacccacatttagcttttcaaacatgcgatagcgatagctattcactgttttggaacttaggttcaaacgctctgctatgtcttgtgccttttcacctttggtgatcatcagcataatttgcagttcacgctcagaaagactctgaaacggattttcgtctgtgcgtccgcttacctgtgcaagggcaatttgctgagcaatttcaggcgcgatataacgttggccggcatttacagcacgaatagcgttaaccatttcatcagagccggcacctttagttagataaccatgagctccgatttgcatcactttgcttgggaatggatcttcacaatgcaccgtcagcacgataatttttacatcagggcaataacgacagattttcttagttgcctctaaaccaccgatacctggcatgttcatgtccatcaacacgatatcaggcgaatgttgacggcaaaattgcaccgcttcttcaccggttttagcttcaccaaccactttaaaaccacgaacatcatcaagtatacgtctgatacctgtccgtacaagctcatggtcatcaactaaaagtacattaatcaatggaacaccctcaaataacccaaatacatgcttgtgtaaatttaatgtgccacattagcacagaatgagtgaaacaataaatcaaattattgtttcactcatcattttatgcggcgtttttctcgctaaaacgatcaacccacagcgcaataataccatcacctgtaacattacaagctgtaccaaaactatcctgtgctaaataaagtgcaatcattaatgccactgcgccttcattgaaaccaagcatgcttgttaatagtcctaatgccgacataaccgcaccacccggcgctccaggagctgcaatcatgacaacacctaacatcataataaatggcaacataccaaataaagatggtacatccatattcggtgataagaacatcactgccattgcacatgtcacaatggtaattgttgaacccgataaatggatggttgcacataacggcactgtaaagtttgcaacatcttcttttacattattagctttacttgagcgcagcgatacaggaattgttgctgcactcgacattgtacctaaagcagtaaagtaagcgggtagcatattttttacaagctctaatgggtttctttttaataaaagtcccgttgaaacatataaaacggttagccataaccaatgcatgatcaatgctgcaagtaatacaataccaaatgtttgcagcgtatctaccacagtgccagcgactgtcatctctgcaaatacaccggcaatataaaacggtaatgctggaataataacctttgctaataagccatcaattacatcacgaccctgatcagaaactttcttcaacatatcaagttgcatttggctcataccaataccaaaaatgaaagccgcagctaacgccgtcattacgctcataagtggtggaatttctaaatcaataaagctgcccacttctgtagctacttcagcttcaaacgttaagcccccatcaaacaatgggatcatggcgctgactaataaaaacgctaaggtgccagcaataatcgttgacccataagcaaaaccgacagttttgccaagtaagtggccagaaccttttggtaagccagcaataccagatgcgataaaaaataaaataatcagtggaatggtaaaggtgatcaactgacctattatttcttttactgtatagaggagttcaacacctgttagcggcacatacaagcccactaaaataccggcaacaataccagcaattaattttagaattaaattcataacgatcacttcaatttttaggtggtaaccttttaccacgttttagtttacttttgttataaaacagccaaattaacgtttaactgcgcaaattaccaccacagcttcgcagaatctaatttgaacgtaaatatatgcgtcctatcgcgttgcatttgttaacaaagttgcaagttaataacatgctcgcaattttgaatacccgtgtagttcttatgtataaatctatattaagtgccgctctactgagcacaccttttacttccttggccaccagccaacccatcaccctcccttttgttgcggaacaagcaacaattgacggaaagctaaatgaaccaagttggcaacacgcaaaaaaaatcacgattgataatgtcacatggccttatgaaaacagcaaaagcccagtgaccacacacgcctatgtctatgaagatggcgagacgttatttattggctttgaagcaaacgacccaaatccagaactaattcgcgctttctatcgtgatcgtgatgcagcatgggatgatgacttagtggggctgaaaattgattcatacaataatgctcaattagcttatcagttttttattaacccacttggcgtacaacaagactcgatagaaaacgaactgactaaacatgaaagctcatcatgggacggtatttgggatagtgttggtgttattcatgataaaggctacacagtagaagtggctattcccttacgcgtattgaattttgacgacagcgtagcaaccaaaacgatggcgatggagtttttacgatttttaccgcgtagtgagcgtttgcgtatctcaaatatgcaaattgaccatggtaacaattgttggatttgccaaatgccaagttaccaaggttttgaacaagcaaagcaaggcaataacgtggcgattattccatctgtggtgcttggcaaaaatgagactcgtgatatcgatggcgcacaagtggctgattgggagtcagagaacaatactgaagccagcctggatgttaaatgggggatcaccccagatattaccttaaatgcgacgattaaccctgacttttcacaggttgaagcggatgttgctcaattgagtgtgaataataatttcagcttgttcttcccagaaaagcgtgccttctttttagataacgctgactactttgcatcaacacttaaccttattcatacccgtaatattgcccaaccagattatggaaccaagatcacaggtagcaaaaatggccatacatttgccggttttattgccaatgatacgcaaaccaatgtgttgatcccgggcaatttaggttcatctcttgtcgcccttgacgagaaaagtgaaaacggtgctctacgataccgatacgactttgaatcagggttatcacttggttcaacagcaactcacagacaaagtgatgattataaaaacacggtttatagtattgatagtaaatacaaaccaacagtgaacgatgttttcctagtacaagtattaaagtcacaaacgcaatacagtcaggattttattgacgagttatgtgatggtgataactgtttacaacctgagcaagtaatttgtgaattaaatagtgattgcgactataacgaaggtgtacttcgtgttttaagtaaagaacaacaatcgggtactggctactatgttaagtatcaacatgatgagaagtactggcgtgcatttgctgactataattatcgcgatgctgatttaagagctgacttaggttttatctcgcaagttgattttaaaaagtttactacaggtggcgaataccgctggtatggtgataaaggtaattggtggaaccgcgctaacctgtatgccgactgggatattacccacaacgaaaataacgaacttcttgaaaaagaagcacaaaccagcttttctgtcagcggcccattacaaagcttttttgaagtctctgttgagcaccgaaaccgtacaggtcttcgccacgataaatcacgtttagatatagacggcaacactgatttatttagcgaaaatggcgttggcttttacagtgattttaaaccaaccgctggggtctttgcttctttatatatgtatacaggtaatgccgttgacttagccaataaccgcactggtgataagtttcatatacgcccggtactgaatatgaaccttggtaaacattttgaagtacgtttacgtcatacttatgagcaacttgaagctgatggtagcgaagtatttaccgcaaatttaagtgatgtgcggttaacttaccagtttaacgtgaatagctttttacgccttgcagtcatttataccgatttagaacgtaatcaagctaattacattgatgatgtagatagccaatataaaaagttagccacccagttattgtattcttacaaactgaacccgcaaacagtattctttgcaggttactctgataatggctatcaagatgatgaactttcatcgataactaaagagcagcgtaccctatttgctaaatttagctacgcttggttactttaacactccattagcgcacctttcggtgcgcgcccttcttttcccaccttattactaaatgctataagcctattcgctatatgttatagccaaactttactttcgttttttaatagtcacagtaaagtgtgactattacagatcaatagcctaagctagttgatcacgattgaataaattgcttccaagggaacactatgtctaacatttttgaagataattcattaacaattggtaatacaccgattgtaaagcttaaccgcgtaacctcaggtaatgtttttgctaaagtagaatcacgtaacccaagctttagtgttaaatgccgtattggcgcttcaatgatctgggaagcagaaaagtcaggcgtattaactaaagacaaagagttaatcgagccgacttctggcaacacaggtattgcacttgcgtttgtagcagcttctcgtggctataaattaaccctgactatgcctaatacgatgagcctagagcgtcgtaaactattaaaagcgttaggtgctaacctagttttaactgatggcgctaaaggtatgaatggcgcgattgaaaaagcaaaagaaattcaagcaagcgagcctggaaaatacattcttttacaacaattcgaaaacccagctaacccaaaaattcactttgaaacaacgggtcctgaaatctatgaagcaatggacggtaaaatcgacatcttcgtagcaggtgttggtacaggtggtactattacaggtgttagccgttaccttaaactagaaaaaggcctaaacgtgcaatctgttgctgttgagccaactaattctccagttattagccaaaccttagctggtgaagaaattaaaccgggtcctcataaaatccaaggtatcggtgctggcttcatcccaggcaaccttgatttagaagttgttgatgccgctgagcaagtatcaaatgaagatgcaattgcaatggctcacgagcttatgaaaaacgaaggtattttagtaggtatttcgtctggtgctgcagtggttgctgcaaaacgccttgctgaaaaacctgaaaatgcgggtaaaaacatcgttgttattttaccaagtgctactgagcgttacttatctagcccattatttgctgaagaattcagtgaaaaagagttagttcaataacgagtgcagttaatttaagaaaggatgccaaggcatccttttttattgccaagcaaaaataaatcccacaattttactaagttaactttacatctcagtcatttagtcacacacttaaaattatttaatctagcaaatcaaagcataatgaaaaacgtactcttaatttttgctctattgagtagttgcttaatgttgggttgtggctctgaagagtcacctcagggcgaaaaaaataccccaggcaacacagccacgctttattttgatgcactgtataaccaaaacgatttaaatcaagccatggaatacgcaactccaaaaatggctcgcattatgaagtcttatggcaccgcaaaccaattcgctcgtaacctaattaacatgcaatacgacgaagttgtaattgaagttgatatgaccaatatgagtttacgtgaacagtacggtgataaggctaatattaatttaatctttacgggttacttcaacggtaaaaaagtggatgatatgcgcagtgtaaaaatgatccgcaaaaaaggtaattggtatatagaaaagattaacgccgatccatttgctcgatagatggttatcttaaagtaaaaatgggcctaaaaaggcccattttttgattccgtgtataaattactcttcatcaaattcttggtgttgacgctgtgcagggcgcgctaagatctcaacataaaacgatgttaagcctttggcttcaatatcactaatacatttattaatctctgctacgtgaacaacttcggcttcatccgctgattcaccaaacttacagtcaaatgcccaataatcagcaccagctgggagtgttttattacgctcacgtttcaaatatttttttacttcgtgtttggctgcatcaaccatgcgagggtacttaatcttctcgtggttaagcgtgaatgtcttcttcattatagtcctaatagcttggttcaatgacaatggcgctaagccataggcacacagtataacaaggccataaaaaattagctgtattttttcttatgttgcttgaatttacttattaaagtgtagattaatttatttatgtgacaatgtagttaatcaattaggctgaaattaaatgcaaaggttgatgaatagcatcttctgttaaactatcgtaaaaagctgcagcgtcaatttgggcacgctcagttggttgatttttatcaaggtagcgttttcttactgcgggctcacaattgtctatcacttctagtggaatgtgatttttatcatctcgaacatgcaatggctcaggtgctaaacaatgacgtaagcgaatgtctgaaagaccaccttgaagtaatcgaagagcattaccttgaccaatcaacatatcaaattgctctggtgctaatgattgcttaggacctgcccctaactgggctctaagcacctcttctgaaacgtgaggattacttatttctgttttaggtagatgaaattgactaaaatcaagtgcgtcatgtgagagcattgctaataataatgcaaactcaccagagcgatgttcatgaacacttttattaagacgattatcgagttgactctcagtgagcaacaaaccatcaacttgcatagactttagccaaatagattccagattaatcagttatcggcattaatccaattttctttagtttttttctttacttaaataaccagtttgctattatcagcgccgttgcattggaggggttcccgagcggccaaagggatcagactgtaaatctgacggctcagccttcgctggttcgaatccagctccctccaccacttccttctggtagtggggccaaatgcaatagtaaaatctgtgtggaggggttcccgagcggccaaagggatcagactgtaaatctgacggctcagccttcgctggttcgaatccagctccctccaccactctttactctttctagctttactctttctagctttactctttctagctttactctttctagctttactctttctagctttactctttctagctttactctttctagcttatcgctaccaactcaaactactgccattttgtttcaaccattgctcagcgtttttatagtctggataaaactgtctaacacgttgccaaaacttagcactgtgattcatatgtttaagatgagcaagttcgtgtacaaccacataatcaatcacccatgtcggtgcactcgctaaatgtaaattaaaggtcagctctcgacgcttattacaacttccccaacgacgtttataatgttgaattttaagttttgtgggcagagcttcagacatctgcaaacaataatcatgaacacgcatttcgatataactctctagcttttcgtgtaaaaactgctcgagcagtgctaaatagtttgcttcttgatgtttgacccgtgatgaaatagataaaataagccgacactgtgcatcttgttgccaagtgcttttagtgcctttagcaaatactatcggcacattttgtccaaataacttaatcgccgcgtttacaagaggaagttggcggcgttcagcatgaatggattgtttggcaatttgttcatcgacccaatcttgcttggtctttaaccaggcatcaatctcagtttgtggaacataaaaaggcgcataaacagtgagtttctgctgggcaactttaatagccactgtggttctgcgtttactgcgctttagggtgtagttcaacaaatataagccaattcaattaataaaaagtatggattccattttaccctgtaaaataactgctaatctataaagatgaccaacaaataattttcatgtttatgtctgataaaccttgttgtagttatacctcgccttcaggaaagaaatgcttggaaaccgatatggggtctggattctgtttttggcacgatagtaagtttgataagtcaggactagatctaacccagaaattagagcgttatgcgaaaaaaggcggtttactgcatgggttacagctaaagcgcgctaacctcagtggtcttaatcttattaagcaggatgatgaggagggatatgacctatcctactgtaacttttatcgagcaaacctatcaggcgcacacctttttaataacaaaatcgctaacgcatcattaatgaaagcaaatcttcacgatgccagcttacattattgcgatttaaagaatacaaacttattaggggttaagtttaatgatagtcgtattgacaatatcgatttaggcgaccatttactgcaagaagcacaggccattaaagctcgcaaaaatagacagtatgatgaagctcgtgacttattcgaacaatccgaagagatatatcgaaacttaaggaaggcatctgaaaaccaaggactttttgaactggctggcaactttacttataaagagcttagaatgcgccatgcccaatatccaaaaggatcaacaaaacaaattacgtcgagttttattgatatgctttgtgggtatggtgaaaagcctgaaaacgttattcgctttagcctttcgctgataatctgctgcgcaatttgttactttctattcggtgtcagctatagcgatacaattttgcaacttagccttgataacacttggcaagacaacttatctgccttattgaatagtttttactttagtgtagtaacattcacaacgcttggatacggagatataactcccataggtttttcacgatttattgctgcattagaagcattttgtggtagtttttctctcgctttgtttgtggttgtattcgtaaaacgtatgactcgctaaagcataatgtatgaaccaacgtgctttttagcttgatacatttttttatctgctcggttaattagctcttctgcatcaacagtgctatcaagtggggctgcgattatgccaacacttaaatgtaattccggatactgctcctcaaaaatacctattagtttttcacagatatgggttgcactagcaacttcacaatctggcaaaatgatgcaaaattcatcaccgccataacgacatggaacgtctatttcacgaatattttccaacaaatattggcctatgtacttaagaacttcatcgcctttttgatggccttgcgtatcgttgattgatttaaagtcatctaagtcaaaatagacaattgtaagcggtgatttatggcgccgagctcttgctaagtcacgctgtaaaagctcttgcattacgcgtcgattataaaggttcgtaagagggtctagtttagccagcttttcaagctcttgagttcgttgtgcgaccttttcttcaagtccttttgcgtagacttctgttcgacgttttgcgttctcaatctctccaactaagctatctatgtaagtatcaaacactaaggtagtatcaaaataaattaatctatcaataaccgttagagtttgttgtaattcagtgtggtcactaatcttatctctaagcacatcaaagatcagttctttaagcgtacaaactgccgacaaatagagtttaggttctaccccaatacgtttgtgaaccataccaattcttagtctattgttgacatattcatgctcataacgaccacaaaataaatcaataatatattgacgctgcgcatctcttaatcgggttaatgtatcggcatcaccaattaacaatgatatttcatcgacttctgtttgctttttataaaaatcactcaccacatcttcaatcgctgattcaataattggtttgtaattaattagtgatgataaacttttcgaagtgagccccagtaaactcattctgtgctgaatttcaacgtcattaattttcatttggtctactaaagtctgttcagttctacgcatttaccacctcaaaatactcctttttaactaaatatagccaaggaattaaaacctacgaagtttagttagagtattttctcaaaataactaacaatttatattagactagttataaaggcagtgacgaataaatatgatgataaatacgttttttataaccgatcaaaatcccagcttaattgttaatgggatctacgaccccacattagtgacgctttcaatcgcaacagctatttttgccgcctatttttcactttatattatagatttagcaaacaagactgagtttatctcgtaccaaaggttaggcagtgcaacgggcgcattagtgatgtctggtgggatatggagtatgcattttatcggtatgctcgctttttctctgtgtaccacagttaattacgaccccacactcacgtttttatccttcctacctgcatttttagcttgttacatatgcttttcaatcttcaggcgccattatatgtcgggtatcccgcgtgcaattaaattagccttgggatcagttttacttggagcaggtattggcacaatgcattatacaggcatggctgcgatggagatgagccctctgcttcgctatgaccctagctggttttcagcctccataattgttgctgtccttttatcttttatcgggttgtattcacgttttcatttgagtgatcacttcaaggcactatcagcgctccaaaatcgccttatttgcgccattatatttggttttgcagtatcaggaatgcattacatgggtatggctgcaactcggtttgtagccacatcccctctgctatctgaaaatgtccaaacatcgcagctggtttttattgcaattagcgtctcattcgccaccgtattacttaccactttagtcggaatatttaacggtatggtgcgttttcgcttgctactcgctgaaaagtctgcagaagaatctcgtctagaagccattttaagcactgctgttgatggtattgtgactatcaacatcaaaggagtgatattgagctttaataaagcagcagagaacatttttggctggcagcaacacgaagtgttaggcaaaaatgtaaaaatactaatgaatgatgatattgcagctcaacatgatgactacttatcaaatagcagtaatcatgaagttaaaaaaatcatcggggtaaaccgaaatgtttatgctaaacacaagcatggacacttatttcctatccggttagggcttggcgaagtaaaacaaccagacaaagagccactatttgtcggttttattactgatctaacagaacagcgtgctttgcagcaaagtcttgaagaaaaagagaaacaataccgcaccttgatggataatatgccgggtgctgtatttcggtgcctattagacgaaaactggagcatgctgtttattagccccagcgttttagatttaacgggatacagccctgatgagtttgtttcaggtcgaattaattttgagcaaatcattcatggcgatgataaacaatctattaatgaaattatctcaaatgctgcagtaaacaacactcaatacgccgttgaatatcgcattcgccatcgcaacggtaagattatctggctactagagcaaggattagtaaacgaaactgtcgatactgataaaaagtgcattgatggtgtattaatcgatatcacggctcgtcatgaatatgaagaatcactaaagcaagcaaaacaagaagctgaggctgcggctcatgcgaagcaatcatttatggcaaatatgagtcatgaaattcgcacacctatgaatgctattattggctttagtgatattttaatggatagcccattaagtaaagaacagcaaaagcatattattaccgttaataagtcagcacgctcattactgcacttgcttaatgaagtattagattctgctaagttagaaaagggcaaactcgacatacaacttgagcattttaatttacagacactgctcgataacatcgtttctactttttggcttgaagcaaagcgaaaaaatttactgcttgatctgaagatcaacgacgatgttgcacctgtttatatcggtgatgaaatacgtattcgccaagttatgaataacttgctaggcaatgctatcaagtttacagagcaaggctctgtgacagtcagcgtcagtaaaacgcaaaataatcaactcttctttgaaattaaagacacaggtattggtattgctaaacaccgtttaaatgctatttttcaaccatttgagcaagctgatggcacaatgactcgacgttttggaggcacaggtcttggtacgactatcagcaagcaattagttgaattaatgggtgggactatcaatgtaattagcgatgaaggacaaggtagttgtttttatttcacgctccccttacaagagggagatgcaaaacaagttgatattcttaatcacagtaagctcaccttaccacctttgcgaattttagttgttgacgatattgagcaaaatatcgagctacttaaaatcttgttatcgcaggcaggtcatactatcacaaccgcaagcaatggttttgaggctattgcagcgttcgaaaagcaaactttcgatgtcattttaatggatattcatatgcctgagtgtgatggtttaaccgcgtgtaagaagatacgggaattagagcaaatacaacaactaaaggttacgccaattatcgccctcaccgcaagcgttcttcaacaagataagttgacaactaaagaagctggcatgaatggctttgcgaataaacctgtggacattagtcaactaaatcatgaaatagccaaagtacttggtttagacattagtactacccatgattactacgaaagtaatgataaaaaacacataaactacgataaaggggtgttattgtggggttcgaaagaaaagttaaatactgaaattggcttattcctagctaaccaccaacatagtattctacgacttaagggatccacactcagcgaagcagagcaaaaatcaattttacatacattaaaaggtgttgcagggaatttagcacttgcaaagttattagacctactgactttagctgaaaaagagcgtgaaaaggatagctttgctgcgctgattgacgagtgtgaacaagaatggcgtattctttactctcagcttggggaccttaaccagtcaaaagttgatcaaccgctggagcacgctattcccataggcgcattaatagctaaagttaataaactgctcacgcaagctgaacacgcagaaatagacgatgaactattaaaccttgttcaaacagaggccccagcggagtataaagacagggttgttgaaatttgtgcgcattttgataattttgattttgatgcagcgatgcaggctttaactgagttaaagcaatgcctcttagctgctaaggaacacaaatgactcccgtttcagaacgtgaaagaattcttgtagtcgacgacgaacctgcaaacctcaaagtgctcagagaagtgctcgctaaagattaccggctatcatttgctaagtctggcgagcttgcattgcagcttgttgaaaatgaaccaccaaagctaattttactggatatcatgatgccagatatgactggttttgaagtctgtaaagtattaaaagcaaaccccaaaacagcgcatattccagtcatttttgtcaccgcgctctctcatgagcaagatgaatctgaaggctttgcccttggtgcagtcgattatattaccaaaccaattagccctgcgattgtaaaggctcgtgtaaaaaaccatctatcgttagttcatgctgaacagttacaactggcgcatattgatttgatccaacgcttaggccgcgccgcagaatacaaagacaccgacactggcgagcacatttctcgtatgagccgttacagtaaaatattagcacttgcctatggtatgagtgagcatgaagcagagcagcttaggcaagcagcgcctatgcatgatatcggcaagataggaattcctgatgctgttctattaaaaccaggacgtttaaatgaacaagagtatgagcatatgaaacaacatgctctcattggcgctaaaattctagaaaactcaagttcgccattattacagctcgctcataagcttgcgcttgaacaccatgaaaaatgggatggtacaggttacccgtatggccttaaaggcgaagagatcagtattgaaggacgtattgtcacaattgcagatgtatttgatgcattgacgtcgaagcgcccttacaaaaaagcctggtcagttgaagaagccatcgacttattgaaagacgaagccggtaagcattttgacccacaacttatcgatttatttatcggtcaaatagacagcatcatagaaatcaaaaacacttatagtaactaatagtgtatttaaggcctcatttgaggccttttttaattgcttcataatcgtgagaagtaatttcatggctgttaccggcacagtctttaaaatacattgagtaagtaacaccatgatctgcaacaacggttttaatatcaaattgagctagatgctcaagccacgctaaaaactgtgctgcatttgcaccaaaggcaattcctttacttgtgccttctgcttcaaatagcgccaaacgaatcgtctttgcttgatcttctaaagttaaaggcccttttccttcatcccaaaaagcgagttcaggtaccacactaaaaccaagtacttgttgataccactttactgcagccgctaaatcatcaacatttaagtggcagtgatcaactccagatagtgacggaatagccatgttactcccctatctcagttttcaactgttctaaaaatgcgagcatgtattctgtacgtcgtttagcctcatcctttgctgatggcgtgttcatactctcgctgatgtgtaacaacttaatgaaaaaatgatcgagggtatattttgtatcgtctggttcgcggtttaaacaaaatggatcgtctttatgatacaggtagcgaccaattgagccccctactttcatgcagcggcttaccccaattgcgcctaatgcatccattcgatcagcatcttgcactatttgcgcttcgacgctttgtactttgatattggcactaaaactatgtgccgcaatagcatgatgaattgcgctaaaatactgctcaggataatgaattgaggctaaaaaactcaacgctttgtctgcggccatagtcgatgcttttgcacggtctgggtgattttttgcaaccgcaacgcaatcatgtaaccaagcagctggtaacactactgccatttctgcctgctcggcaatacataactgttttgcaaccctcacaacacgctcgatatgacttatatcgtgtgcgacatcggcatggagtaaagacataataaaatctcgacactgagtttctaaagctgcaaagtctatttctggctgcatatacaggctattaccattaactaattgaaattatgcttactttagcgtgcttgctggatttgttcaaaacattcattgtatgtttgccagtgcttcattaaactatgcccccttttgtttgacgcgagaatccctatgtcatctgctatttacctgcaagctggacgtgaaaaatcattaaaaagaaaacacccatgggtgttctcaaaagccattaagaaagtaaaaggtaagccaggactaggggatactgtcactatctatgacaatgacggtaagtttttagccattgctgcttacagtccgcaatcgcaaattcgcgctcgtgtatggagttttgatcaaaacgaaatcattgaccaagcattctttgaaaaacgtttgcgccgtgcctatgctgcccgtgagcaggtgatcagcgaaggcggtttaaccggttttcgtttaagtgctgctgagtctgattacctacctggtattactatcgataaatttgataatgtacttgtttgtcaactactaagtgccggtgcagaacgccataaaggtgaaattgttgctgcactgatggctattttcccaggttgcgatatttatgaacgttcagacgttgatgttcgcactaaagaaggtcttgagccaatcaagggcctactttggggtaaggaaccaacagaacctgtcatcatcgaagaaaatggccttaaactcgaagtagacattcttgaaggccacaaaacaggcttttatttagaccaacgtgatagtcgtgctgctcttgagcgctttgttaaagacaaaacagtattaaactgctttagctacacaggtactttctcgctttatgcgttacgtggtggctgtaagcacgttactaacgtggatgtgtcacagccagcgcttgatactgctaagcgtaacgttgagcacaacaacctcgatttatctaaagttgattttgtgaagcaagatgtctttaagttattacgccaataccgtgatgaaggtgtgcaatttgatactatcgttatggatccaccaaaatttgctgacaacaaagcgcaattaacgggtgcgtgtcgtggttataaagatatcaatatgattgcgatgcaaatcttaaaaccaggtggaaccttactcaccttctcgtgctctggattaatggaacaaaacttatttcaaaaagtggttgcggatgctgcccttgatgcaggtaaagacttattgatcatggagcgactaaaccaagctgccgaccacccaattgctggcagctacccagaaggcttttatctgaaaggcctgatctgtaaggtttactagttaaaatttacaatttctaaaccggcactcaaggagccatcttgctccttggtcgctcgcacaactttagctgtggcatcaaacgaagtaattgctgtacttgtagaagcaattaacactcgatacaagctacctatttctaatacatcatcaagctgcacagctaaccctgtggcacttaaatctgtacaaattgcagcaacttctttgccctctccgccttctagcggaattaactttgcaggggtgtgaatttgcatacggcgaaagtcacgtttctcctcatgaaacatatggcctcctataccagtgtttttattttctcaataagtgttttaacagaaaatggcttcactacataggcgtcacatccggcatcaaaacccgcttttttctcaagctctgtctcaagtccagacaccataaccacaggaatttttgctgtttcaggtgtattttttaataatcgacacgtgtcataaccatcaaggccaggcatacatacatctaaaaggattgcatcagggggctcagcaatagccgatgttaagcaagaggcccctgaattcgcgtaacttagcgaaaactcatttcctaaacttgctttgagcatctcataattaaaatattcatcatcaacaattaagatagtttgttgaggccgatttatgctgcgctcaggaatagaaatcggtctttccttttcaatgcccacactctctccttttagtagtcacctatttgactcaatttgatgaggattcacgctcaccataatacctttacattaattataactcactttctttaattgcgtttagtacacgctttgcagatacaggatagggtgtccccagtgtttgtgcaaataaagaaacgcgtaactcctgttgcatccaaaagatatttgaaatctcttctggtacaggcatcccctttggaattttgttagtaagtttttgatattgctcggccactttttcaagctctaatacacataaacgatcgcgattaggatcaaccggtaacttttctaagcggcgttcaatagcttttaagtaacgaattaaatctgtcatttttgctgcgccgtgctggcttacaaagcctttgaacactaagctttgtaactgtgatttaatatcaccgtgcgccgtaatcatggttaaatcaacgcgtcctttcatacgtttatttaagccatgagctatactcagcacttgttctacttgggtggcaatctcaacaactgtgtcaccaagctcgccgcgaatttgctctttggccttttcaaatgcctctgcagtgcggatgttgccatatttagttaataggctatcgacggctgcagcgatacagtcatcaattaagtcattcaccttaccaaacggattaaagtacaaacctaatttagatttgttcggtaagttttgctgtaaatatttaatcggtgatggcacgtttaataataccaagcggcgtaaaccttgttggtgcgcctgctgtgctttgtgttcattatcaaatagctcaactgctgctgaatcttttttatccaccagcgccggaaatgctttaatttcgtattgaccttgctttttcacgtaagagcttggtaactcaccaaaactccactcggtcaaatcagctttctctatacccttgtcagctactttagataaagtatccgtcactttaccttgcaactgagctttaagcttagtcagatttaaaccgcgagcaagtaacttatcgttttcatcgcgcacttcaaactgcagccgtaaatgcggagcaagggttgataaatcccatgcatcaggctcaacacgcaccccagtcatacgcaataaacgcgtgctgattgcatcaattaagttaccttgcattggctcgattgcagcgagtaccgcatcggcatagtttggtgcaggcacgaaattacgacgaattgtttttggtagtgatttgatcagcgcacaaattaactcatgtcgaaatgctggaatatgccaatcaaagccagtttcttgtacttggtttaacagtgccaccggaatttgtaccgccacaccatcaacggcttggcccgggtcaaaatgataagccagtggtaataataagttttcttgctgccaagtatcagggtaatcaaactcggtgacatgatcggcaccatgctgcattaactcttctcgagacatatgcaaaaagcgcttatctttttgcttttgccctttccaccacttattaaacgcggcacgattatttacatcttgcggaattttcttgtcgtaaaattcaaataaggtttgttcatcaaccaagatatcacggcgacgtgatttattttcaagaacttgaatatcttcaattaattcttggttatattgtaaaaaaccttcattttgacccagttcttgctctaccaaggcggtgcgaataaataactcgcgacttactttcggatcaatattgctatacacacagcggcgcttattaacgattaataggccatacaaggtttgctgttcaaacgcgataactgcacccggctttttctcccagtgcggttcactgtagctgcgtttcactaaatgctgtgcaaagccttccacccatttcaagtctatacgcgcgttgatgcgagcataaagcttactggtttcgacaagctccgccgccataatccattttgggctctttttaaataatccagaacctgggaaaatatgaaactggctattacgggcgcctttatagatttgtttttcatctttaaaaccaatatggcttaacataccgcttaataaagattgatggattcggtcactatcagcaacattggtggtggccttcatgcccatttcattacacaccgttgatagctgataaacaatatcttgccattcacggatacgcatataggctaaaaagtccttttggcataactttctaaactggctattgctcaattcagattgctgctcttcaaggtaattccagagatttaaaaaggcgataaaatctgaatcagggtcgtcaaagcggccatgcttttcatccgctgcgccgcgtttttcttgtggtcgctctcttggatcttgaatcgacaatgctgcaacaataataatcacttcacgcagtgcgcctaagccatcagccgtgagcaccatttttgctaggcgcgggtcaacaggtaagcgacttaaacttctgcctgatttagtgagttccgtctttttatgacgtttagcaggcttaattgcttcgagttcttcaagtagcgttaaaccatcgttgatattgcgactatctggcgcttgcacaaacgggaactgctgcatatcgccaagtcccaagccgagcatttgcaaaataacagaagctaagttggtgcgtaaaatttcaggatcggtaaactctggtcgcgaattaaagtcttcttcactgtataaacgaatacagatacctgcttcaatacgaccacaacgacctttacgctgattagcactggcttgtgaaattggctcaatcggtaatcgttgaacctttgttcgatagctgtagcggctaatacgcgcggtacctgggtcgataacatagcgaatacccggcaccgttaatgacgtttcagcaacgttggtggctaaaataatatgacggcgactgtgcggcgcaaaaattcggttttgttcagcgtttgataaacgcgaatatagcggtaaaacatccgtgcctttgaggtttcgcttcgataacgcatcggcggtatcacggatttctcgttcaccattcatgaaaatcagaatatcgccggggccttcatcgcaaagctcatcgactgcatcaaaaattccctgtagttggtcaccatctgcttccatgtcgtctttattgatttcagtggttggtctgtaacgaacctctacggggaatgtacgaccagatacttcaatgattggcgcattatcaaaatgtttagaaaaacgctcagggtcaattgttgctgaggtgataataacttttaagtcagggcgttttggcagtaaattttttaaatagcctaagatgaaatcgatatttaggctgcgttcgtgggcctcatcgatgatgatggtatcgtattgatttaggtacctatcttgttgaatttcagccagcagaataccgtctgtcatcaatttaatgtaactattgtcagaaacttggtcgctaaagcgaattttaaagcccacttgttggcctaactcgcattgcatttcttctgcaatacgattcgcgacacttcgagccgcgagtcgacgaggttgagtatgaccaatgtatccgtcaacacctcggccaagctctaaacacatttttgggatctgcgtcgttttacctgagcctgtttcaccggcgatgatcaccacttggttattggcgatcgcctgtttaatgtcatctttcttttgactaacaggaagttgctctgggtaggtcactttaggcaaggcagccaaacgatgctcgcgtaattgctgcgaacggctaatatcttctgctattttttgcgctatgctcgcttgcttagtttcatcgttgatttttttgatgccatgtaggcgttttttgaagatgaattgatctttgcgtaaacacgtttttaattcgccgaacagcggacctaggttaaccacccgatacccttatatttcttaaccaatagactgatattgtatcaaataatctatcaggtggtcatggctttatttaatccgttcggttggaattggcatggcacaaacgtcgatgtaatcagggctttcaacaaaccatgcttctacgcgatttttacgcgcttcaataagggctttaaacgcatttgagtctgttttcatcacccgaaactcacttttatctgtgtctttaatatctgctaatacttgcatatctgtaatgggattaaatgcctgaccttcagtggctttacgctgcaatagattaaagtgctccatgccttctaaaacacgaccaaacacggtgatattacggtctaaatagcgctggctattaccgatggtgacataaaattcggtaccaccggaattaatatcattaccgcgggccatagcaaaaattcctgggcaatgtacttgccatgtttcggtttggctttggttttgtgccacagcaaagccatttaaaaagcccgttttagcggcatagccatcaggccctttaagctctgtaatcgctaaaggagcctcggtgcgtagataaaactcagcaggtaaccctttttttgcatttttaacaggtttactttcgctggcatctccgccctgcgcaacaaatccttcaacaaagcgatacatactcaggccttgataaaacccttctttggcaagctgtcgcatgttatttgcgtgaataggcgctagtttatcgtttagttcgatataagcagcgcctgtaggtaaggttaatttaataacgttttcggcactgacttttcgccactcactgctacttgcggttttaatgatttcgccagcagaacgtttttggcttgtttcttttgcagcaattggtgcagctaatactacgccaaggcacagagttaatagacttaatttcattgttattatcttttaagtaattgacaactcagcctattaacttatgccttaataagcaaataaaagcgatttatggtgccaagtagatgtattagtcccaatcaaatttataaagaatatcaacattttgataaaggccgctggtgacctcgatatacaattgcgacaacaattgataacgaactgccacttcacttaatgaatcaaaaatgccgacactgtatttcacttgaatacctggtgtaacatagccagatatttcaactttggtgtcatccccgctaccgcttgaacttaagcttacatcagacaaaccaaagctttcaccaattttagataccacaccttcactacggtttacaccttgggcaagcagtaattgggtgagcatcgcatcggttgaactgtctccttcatcaagaggttgaccatttaataaataagccaatgcttgggcttggtccatcgcaggctctgagaatacttttaatgaaggctgttcaacattaccagttaaggtaatacccgcaatcacgccattcgaggtgttgtctggattacgaattgccttaatgttcaagtacggtttatcaattgagccactaaagcccacctgaccggtgcgaatttgcaagtcttgaccaaaagcacgataggtaccttgaactaggttcaactcacccgttgctatcatcggcgtaacttggtccatgctgatgtttatgtcaccttcaactttcgactgtaagccaaacgagtcaacgcgcacatcattttcaaccaacacctttaagttaatagcataatcaaagggcactttttctgactgttgctgctcaatatcaacaatgacttcatcatcgctgacttgtacagcgccttctggtagctcttcaatggcaatacgaccccatggcaccacaacttggccatcaagattaaacgcattattcttcaacgacattgttaaatctggcgatactttaaaggtgacatcttgctgggcacgcacaaaaaactctttaccgtttaatttcacgtcaacgtcaggtaaatcttgctgccaatcaacaccaccagataaattaagcgcgcccccttcagtatctttaagctcacccgtgagcttcgcactttggttattaaaggcaatgttcacataagagttttgcagcgatacaggcagggttgccccttcaaggttgattttttcgacatcaaaatcaccattgagtaatggttcttttaaagtacctgcgattgctaatcgtcctttgatgtcgcctgttaattgctcaagtgaagcaataaagggtcgtaagtttgttaactcaattttctcaataaccaagtcgcccgctaaggtctgttgattttgaatatcatcaatgttgagctctgacgttactttacctaatacggatgaatcaatagtggcattaagtttaccaacttgtgcgtcgctcattgccgaaatatctaaaacctcaaccggtaatttatatacacttgcaccatcgattaaggatgcttcaagctgctgagttttgatattggcacgaatagtttttagtgcgccattattccagttggcaacaaactccccgcttgcatcccctgttactttcaagttatctggtaagaagtgtttaaattcagcaatcgataacgctgcaagctgtgcatttaactggcctaactgcttagtttgctgcaaagtctcaaagcataattttgagttatcactttgccagcaatgtgcagcgacattaaagtcaaatgtcttggtattaacttgaatattaattggtttattagtgccaaagcgcacctgattatcggtaacaagaatttggctcagcgcaccttgccaggtttctttattaaatttaccgtcaatatcaaacgacgccttgccttggtctgcatcgagtaaaaaagttaaatggtgatctgttttatcgccgctagcgtctaactcaatttgattaattttgtgttcgctaatcgatgcagaatcaagcaccaatgacacatccgtttgccagtctgcagcgtaatcaaattgcccttttaatgttaaaccatcaacctgaatatcttgatagctcaatgtattaagaactaaatttaaatcaaccgttggcgcaagacgctcaccacgcaaactcaaatcagcaaagcccttgccttgcataggcaagatatcttgaccacttgcatctaaacgcaatttgccgtcaacttgccatacatcatctacctgacccgataaagcaatttcatttttaccgcttttcacttctagtttattgaaactcgcatgcaagctgctatcaagttcaaagtccgacagcaaggtcacaggtacttcattcacagagccatttaattgtgtgttatccagcgcaagctgccactcacttgcttgtaagttaaatgaaccattaaattcaccagataaatcactacttagtgcatccgttaaatattgggcttttaagtggcttaaaccccctttaaattggctttttacgccatttgaccaatcaactgatgcggtaatttctgctttactgtcgttagtattaaggcttaactgctcaagttttgcgtttgttaaactaccttgtaattgcgatttcacagtcattgccggtaatgcatctaactgcgttactaggctcaaatcaacagaataagcatcggcatggcctttcgcttttaaatcaaagtccgataattgcagctgttgtgtatctgttgctatttgccactttgctatttgaccagtaaaatcaaatgggtaatttgtttgttttaggttcacagccccttttaactctgctgggtatgctccctgtgtaactaggtctaactttaaatcctcaagcggccctgaaactaataacttagcttgatgctcattgctatttacagacacagccccctcaattgaattttcacccgaaagctctgccactaagttagagtgcaattgccattgctgataacctgcagcaagcttttcaagattaatatcgcttcctttggctgacgcaatcaactcgatattttcaataagctgagcctcttctgcgccataaggggtaacagcaactttactgatttgaaattgctttaactcaatattaatcggtagcgtaatatcgagggatggtaatgctggcagctctgttaatggcgttgatttaggctgcttttttgcttcgtgtagcatcatagcaacatcagcaatggtcagtgtatccactgtaatatccgatgcttcaccgcgaccacttaagtttaatttgttgactgttacatcggcactcggatgcgcaagattaaagcgattaattgcaactcgcttaacagcaactttcattggtaagctaatttgtgcggcttgtgcaacttcaggctctgtttcagagccctgctcagttgatgcagcttggcttttaatatttaaatctatcgactgggcgcttaaattatcaagacaaatgccatcacaacgccaccagaacaaatcaatttttagctgctttgcatcaagcttgatgccttgattttcaaaatgaacatcaaacgcatcgttatataaaaaacgcccagatggcagctttattgttaagccatcaactaacttattagctgtgtatgcaataaagtgattaccgggcgcggtgaatagcaaacaaaacacaataactagcagacttgccaacgtgattgatagaaccttggttatcttttttaacatcttcattagatttcaggccctatggtaatacttaatcgggtacttttgctttcttttgtcagaccccaagcatggtcgatacgcaccgggccaacaggggttaaataccgaaaaccaaaaccggcaccgacttcgacgcggtcactaaaatcattagtcgcagtaccactatcgacaaataaggctgcgcgccaatgctcagcaaattgatagttatattcaacagtgccactcatcaaatatttaccaccaattaagcgcccttcctcatcttctggggaaatagattcataagcaaaaccacgtacactctgatcaccaccggcatagaaacgcagtgataacggcacatcatttatattatcgaccagcatggcacctaggttggctcttaaaaacaacatatggcgatctgcaaaagtagttagccaggcattttgcagttgtaagcgcaaaatgttggttgaagacatcatatcttttaaaccaaattcggccgaaaccatccattggtaaccttcataaggtgttgtacccccttcagtatcttttttcgcataactgatgccgggcatcagcatttttgcactttgctcctcatcgccaatacgataagtttcataatcacgtcttaaaaaggccgtacgcacccagtcgtcttcggttagccattgcctttgcaactgtccggttaatattttgctgtacagatcattagttaattcgtcttcgagcttgtaacccacagagaagcgccaaaggtcatcattaggatcgtcgactggtaccgtatagcccaatgatatatcttgctggcgctcagatacatttaggttactttctaagtagtggccatcttcggtgatccaaggtttggtccacttaaaacgaactttcggaccaagatctgtgctataaccgccacccacttcatagctattggctggcttatgtaatacatcaacattaacaggcacttgattatctttacgttttgcaatatctgcatacacacggacactcgcaaaataaggggtactcgatagcgctaagttgtaatcagaaacctcggtcgctttatatggctgaccttgtttaaactccgccagcgaacgaatgtatttttcagcgggagtctcactcccaatggtgatatcaccaaactgatagcgaggaccggtatcgacattaaaaatgacttttgcgctattattttttagcgatacggccaatttatgctcgtgccacttcgcatcaaaatagcctaactctaatagctggctttcaagaccttttctagcagcctcatatttaccgtgatttaaaaagtcaccctgcttgattttgatactattgacagcagacataaattcagcgtcatctttcccggcaccagtgatagttacgttgatatctgcaattcgggtaacagggcctcgttcaacatcgacaattaatagctgctgcgcgttatcgaaactaattttgatggtcggtttgtaatagccaagggcttttaaactcatttctacttggcttttagcatgacgctttaatgccttggaagttttttcatcgataagttgttttatgtaaagctcaacgttcttttcgagctcatcactgatcccctgaattttataatctttaataaccgtagccgcactcgatgcatgctggctgtatgaaaagcagataaacaaaaagacaaaaaagaaatgccgagtatacaaaaaatatccttacttttttggaggagtcataatctaaaatgagtacaaaaagatactatcacagtgcaatagccaccgacataattgaaatgctaaaattagtacgcgttaaacaattattttcgctacaatagcggataatacctagatttataatgaatgagcgactaaatgcacttccctgatgacgaaaacggtcaattattagctgaaatagctgaagctggtgtcgatttaaccagtatgcaaaccatcgatttctatattctttttgaacaaaaacctgaagcagaaaaatttgctgaagcgattacaagtgatgagcttgctccttcaacagagttaaccaaatgcccagatacaggggtgtgggaagtaattacccgcgtgaagatggtgccagatcacactttacttagccaaactgagcaatacttagaaagcatcgctaatggccataatggttatggtgatggctggggtttaatggctgaagaacaataagcctgccagccaattttgtaagcgaatcaatttagttgattcgctttacgaaaattcccctgataatcaaatagcttttctgccactttccaaccatattttttatttttacgcgcaatcacaaaatcgggggccagtagttgctgctgtaaatcgacaacctgctcagcgctttgccattcaattggggtaaaacctggtgctgctctcttaccaaactgcttattaaaaataaatcgtccggtgtcatttgctaagttaaatacctcatcacaactagcaccgtcttcatcataataactaattttaagtaaaccttttgcgagaacctgagctgacaaaccactacatcttaataccaaggcatcttttaaatttagtgcttctcgtagtttatcatcagggtctgccatcatggcaccacaagaatgacactgccttgcagcaatgtcattttgttcaccacactgctcacattctttaaaccgaaagcgataatcgcactgtacttgttcttcaccatcgtccagcaagccttggcaacgtctgccaaaatgctcaatcactttgccctcgctgtctgttttaccccaaaaaatattcgcaaatccacaacccggacacagcacctgaacaggctcattatcactttgcgcttttttactgcccacttcaggataaaacaaatcaaaaccattacctgcatagtcaatcactaagcagtctttttttccttcacttaagcgcaggccccgacctacaatctgctggtataaactgaccgattcggttggccgtaaaatcgcgatgaaatcaacatgaggagcatcaaagcctgtcgtgagcacagatacattaaccaaatactttatttgttttgctttaaattgattaataattcggtcacgttcgttattatcggtatcgccggttataagtgcagtattttgctctggtaagtaaccggtaatttctttggcatgcatcacggttgcggcaaagatcatcacgccatgacgctgttcactgtattctataacttgcttgataatagcttttgttgcccgtgtgttatctttcaataatgcattcatattttcgatactgtatcgaccaaatgaatctctcggtagtgatgaaaagtcataatgactaatagcagcatcgacttcatgcggcggcgttaaatagccgttcttaatcatatagcgcagtggtaactcaaaaatacactttttaaatggcgcatctttatcacctctaacaaaaccgtgataatgatgatgataaacccagcccatccccatacgaaaaggtgtcgcagttaagccaagcactttaaggttggggttttgtttttttagactcgctatcacctgcccgtattggctttgttcatcaccgctgacacggtgacactcatcaatgatcaacaaagagtaagcatcactcagcttatcggtattgcgcgccagggactgcacacttgcaaaggtaacttgctctgttaaagacttttgctttaaacctgctgaaaaaatactcgccttaaagccaaagctcacatacttctctgcgttttgctccaccaattctttgacatgtgcaagcaccataattttttgtttggcaatacgcgcaagctctgcaataacaaggctttttcctgcccctgttggtaatacgatcagtgctgcatcatctgtttgtcgaaagtgagcaaccgtgcgttctacggcctcttgttggtaggttctgagtacgtacttcattttatcggaatattcgacataaaaaagggaagcatacgcttcccttcatattctttaaagcaaaaaattaagccaagtgcttagttagatcgacaccttggaacgctttaggacgtttaccacgacccgtccattcaacgatttcaccattatactcgatgcgatattttggtttaactttagtacgcttatctgtacttgctacatcttgtaaatcttctaatgtaagtcctttttcttttaacaaatcgagtacttcttttttagcttcttgctgttgagtatatttctcgattgctgtgtcaattagctgcttggctttttcaagctcagttaacgacgcagatttaacaaaagatcggatttctttcatttagagctctcttggatataaaatttaagttagatgttaaacgttcatgagtatataattaaatcatgaattaatctatggcatgcttattttttatagcacttttcattatattaaagccataacttaactttatctattacgtcaagtagctctgaaatcaacccttcgacaaccaaagtgtcatgttgttgattaaatctattttctgtctgcacgataagttctgacaatggtgggtattggagcataacaattccacctttaagcttatggattgaacgagaaaccttttcaatatcatgattttttaagtgcgtagataaattatccacatcctcttgtaagctgtttataaacacctcagctaacatttttgcatcattttcatttccaaaaacagttaaccaatgctgcttatctttaacaccttgtatatttataaatgtattatcaatggtttcaacatcactcgtgttgaggtcaataaactcagccaatctattatataattcatttagtttatacggcttaaaaagaacgctattcatacctgaatctaaagctttttttagacattctttcgatgagtcagcagtaaaaccgataataggtaaatgcttaaattgctctttttctcgtatacttttcgctaagccaaaaccatctaaatccggcatgtggcagtctgttaataataagtcaaaatgattattctcaagcgcttttaaccctgcgaaaccatcctcgactattacagccttaataccaagcttttgacattgcttttcaagtaatagttgattcgttttattatcctcagctatcagtatttgcccataaacaggagtattttctagtcgggttggctcactacttttagtgtgaatattatcaattaactctcttagtatatctggatacagtgggtctacagctaaaacgtgacagctacattttgcaggtgcttgagtaccattcggacttaacacaataatgtatttattgcttgcttggtttatctctgttcgccagtcgttaccccaaagttccaccatatagcactcatcaataaatatactttttgcctgctcaaaagcatgtttatctaatggccaatctagctgcttatattgaacaccaatgctgtctaaacaatttaacagaggctgattttgactacagacataccaagtaacagaagatagacttagcttagatttgctaacttgggttaatggcacagtgatataaacattggtgcctttcccataagtactagaaatattaatctcaccttccattgcatctagtaattgcttggcaagacttaaacccagaccagcaccaccaaagcgacgttgaatagaattatctgcttgctcaaaaggggtaaatgtttgctttagttgctgagcagtcatacctttgccggtatctgatacttcaagtttaagggtgtttttttcaaacaaaacatcacaactaatcgtgccttgctcggtaaacttaactgcattatttagcacgttagaaacaacttgcatcacgtggtttatatcgacagaagctaaattataggccgctgtacgccacgataaaataaactctatgcctttttgcttagcaagatattcatgagcgcgtataactcggcataaatgcgactctaaatctacatttcgtatttcaacatcgatattacccgcattagtatttgcaaaataaagaatatcatcaactaaagtgcgtaactttaataaagagccatcaatgtgctctaccaattggtattgctcatcagtcatcgttgaagcttttagtaattcaataaagccactaacgcctgaaataggcgttcgcagttcatgactcatggttgcaataaaacgacttttcgctaaatcagcttgctgtgctaattgatttgcctttgtaaggtctgcttgctggcgttttagcaaattaatgtcaaataaaatgccattccaacgaactccctcttgcgaagactgctttttgggctcagcatttgctatatatcgacaccaaatctgctgacctaaatggttcactctaaactcaatatcgatcatgctattaagtttgttagcaagcttaaaacttttagcaattttaaccctgtcttcatcaacaatatgaggcgatatgcaacctgtcataccccgacgattaacggttgtatttgaaatacctaataactcttgcgcgcctcggctaatataagtgtagctcccctcaccattatcataatactcgtactgaaaaacgccgccagggatagtatcggtaattgtttgtagtagtttttgtactgatttattctcacgctgtaattggtgatgctcggtaacatcggtaattactgtcataatgcctgcaagtaaaccatcaacaccatagtaaggtttttttgtataaagaagttcaaggttttgtccttcattattggtgtagtttatttgctgatttatcacttttcctgactttaaactttgtctgttttgcgaaagcagtttcttaaccacatcaagatcagtacgtaggtattgattatctttatcccataaatgagcaaaattatctttataagccttattccacattatgcgacgttgatctttatcctgtatcaccaccatagtaggaaggtcatctatcagcttttgagtgaagttaagtttacttagtgcaacctgttcagcgtgtttgcgttttactatttctctattaattgttattcgccagctaataaagtaaataacagatactgccaacaggattaaaacaagaattgctgtcgtgtttaccgtttttttatcatagccttgctcaatattaaaaataccatggcgattgactacatgagtaaaatcattacttgttaatgttttaaataaactatcgagtaaagtggcaaattcagaaaagtgtttatttactaaaaagtaaataggctgcgaataacgatattttggattgatgtaaaattcaccaatataaaactgatttaattgataagcggcaatgctttgaggcaagattacgccgtcgatgttatcatttcttaacgcataaaaaagagtttgaattgaatcgaatgaaacggtatcaagctgttcactaaccacaagcctctctaatggatttgcaaacgtttcaaaataccctatccgtttaatttctcttgaacgcttagaaattaacaccatttctaaactatagtgagcaggtaaagcaattagtacaccttcatctattttagatggtgtaagtgtaggaataatatcaactttatttgctaaaaataatttttctaactcgctagagttagcggctggtatgtacttaaattgaaaatcacttcgctgtgaaagaagttgcagtgtatcgtttaaataccctctggcctcaccattcttgtttgttgaatttagtggataaatgccatcaataaatgaaaatgtcagtaaataattattaatatcttcggcattaatacggttaaaatcgcgcttaaactgcccatatgcctttgcagctaagtactcttcactcgcagcactttcccacaactgtttagtagttggagatattgaggtcaaaacagaattcacttggttacgtagcaacgtattgtttttattaaacattacatgcaaagtttcacttgataaccaaataggactaactacttttaagttatcatgagtacgatttttaaattgatgagataaagcagaataatctcccaaaaacgcatcaaatgtgccatcagcaattttcttatatgcatcttccggttgaataaagcgattaataaacagagcgccattttcggctaaatattcacaatgtgagctgccagttatacaaacccagcgcaggctagccaaattttttaaagcatcgttggctatcttttgctttgtcacgattccgcgcggcgattccataaacggagtagaaaataagaaatgcttcttgcgttgttttgtctcatttaagccaacagcaaagtcgacttttcctgcctccaaagcatctaaaagctcatttaaacttgcatatacctcataatctaattcagccccaagcaagctggcaatttcattactgtagccaacaatcacgcctgaaaactgaccatcagcatcacgcgtatgatacgggaaaaagttatagctaacgatacctgcttttaaagttgcaccagtctgttcagaattcgcactaaatgatacaagtaatgaaagtaatatatagataaagacagttatcttacccaaacaaaagccttaactaattgttaatcaggaaattccagtataagagattatttcaaatggtacaaataactaacttgtttcaatgcaattagcactcattaatatctgtgctttcttattttataaaacccacttcaatatcaaccactctttgattttacttactaacaatactgagagttttctagttcggaataataataattgattcaaagtgatgacaaacaaacatttgattaagtttaagaactttatgctcattatcatggttttgacgaatcgtttaactctccttcttaataaactattaaaataattgctaaagacatcaggtagccttgtatcaatattttgtccaatgatcgccatgtatattccataaaaaaaggctgaaaaaattcagcctttttacgttcaaaaaactttattagaagctgattgagtagcttactcgataatcgcgaccaaagttgttatataagtcttgatcatcccatgtgccatttgatgatagcactggatcttcatctgttaagttattaacagtgaaagtaacagcaccatatgcaccagcattataagtataagttaagttatgtactaaccagctatcaagtcgaccagacacatcatatttagcaccagcaattggattaccatcagcatctaaaggagctttttcaaactcacttgtgctatcagtaaatgttgcgttccatgctaaagagtgatcttcataagaccatgcaaccgttgcaacagacttaagctcaggttgacctgaccaaccagatgtatcttgaactcgaccacctacttcttcttcatatgaaagtacaaagctattcacgttttggaaacggaaatcaccaaaaccagtttcaagatttgcagcaattgtaaagtcgataccttcaatttcgaaaccagcaccattaaagtaagatgtacctgcttcaataagcgttccagatgcagcacgcttcagatagaaagtctcattcgaagtatctgtatctactgatacagcagagattaggcctgcagcttcgtcagataaaagagcttgtaatgtcttttgttggattacattatcgatttgtaactggaagtaatcaagtttgaaagtaaggttgtcgtttacgtcccacgcgataccaaggttagtgtaatctgattcttcagcatctaactctgagttttgtgtatagtatgtattgtactgacgctctgttgtagagccatttctatagtcaatagcgtcttctgctgaaaatgaacgcgcagcattaagacggtcaagacctggtgcacggaaagactcagaatatgaaccacggataacgatgttatcagctacttgccaacgagcagataccgcaggagcaatattgtcaccgaagtcagagtagtcatcgtaacgagcttttaagttaacttctacagtttcagtaattggaagaactgactcgaagaacagtgctgttacatcacgtttaccctgtgatgagttacctgctgaaccaccgattaaaccagcagctgattgaccatcgtagatatctgcataagtttgctcaaaatattccatacctacgtagtgtgatacttgaccaccaggtaattcgaataaatcgaagccgataccagcaaagtattggtcaaaagtcgatgaagattcttgaagtgttgttgctttcatgtttgcaacaccttcatctgaacctaaatcaatatcattagcttggttatatgctaaaccagaataagaaaggtagtattgaccaacagatttgttatctgctttgttacggtggtaataaacttcccatgaagcattgttccagtcgaagtcaccgcgaagaccagtagttaagtcgatattgtagtcgtctacgttaccgtcacgagtaccgataccaacccaacggaataaaccatacgcaccgtctacaccataagggttgtgtgggttatcagcagacatattttcccactctgcagcaggaggagcataacgaccaaatgatgagttttgaacaaacattgtttgaccaaaccactctacgttatcggaaatttcatagttagagctgatgtataatgtgttacggtcgattgatgctgtgttgtaagatacgttaccaaacgcatacatacaatactcagagcctggaccccagtcttcatttgcatctacacgacggaacgtattttcaccgtactctgcaattaagtcatcacataaaagtgatgcttttgcttgtgagaagtcaggagaaagaactgttgcaccgaagtacgaccaaccaacagtatctgcagtgtatgcttcgatatcaccatcaccatctaaatcaccgattttagctttagtgtaatcacgtgcaccatcactgataccttcacgtttttggtaatcgtatgcaaacgtgatgttacctttatcgtttgagataccacctactacagaaaactctgaagacgttgtcccttcgtcctgatcacgatgaccagcaccaacgttaaagcttaggccttcataattgtcttttaatacaacgttaacaacaccagccattgcatcagaaccataaatagatgatgcaccttcagtcatgatatcgatacgctcaactgccgccataggaatagcatttaagttagctgacgcaccacctaatgttggtgagcctgggaaacgacgaccgtttaatagtacaagtgtacggcgtgaaccagcaccacgtaagttaatagttgcttgagactgagcagagctacctgaacgctctgagaatgagccgaatgagttcaatgaacttgaacgaagagcgtcagctacagtgaaatcaccttccattttgatatcagcagatgtaatgctgattacaggtgatgcaccttcaaggtcagtacgcttgatgcgtgaacctgttacttgaatgcgttcaactttttctacactgttgtcttcagctgcaacagtcgatgcagaaaatgcagcagttgacactgcaccaaaagcaatcgctaagcgaactgcttttgaaacttgattatttaacatttgattctccctggtcatatccatgttatgactttattaatttatttatttaacactaaagggtcaaagccccccttagagctatcaaatactaatatcaggtacaacttttggtcaacttttttttaacctttgttttataagggaatttaaacaataaacaaataatcaacaataaaccaaatacgttaatattaggtacaagataattgctttaaggtacagaaaaagcgtggaaaacccacatcaacagcattttgatagttaataaatgcaacaatcaaaattaacaattgaaataaaataaattatctatgacaggcaaaaaaggaggtggatttcaaaaaagtaacatctatttattaaatgctacttctttttctaaatctaaataagggttttaaagaatcgattcacccataatgtaaattgctagtaattcatcttgattgttatcaaagattttcccaacttcacaattgactttcattgtttctacttgttcgatcaaaagtgctgactggttagcagcatttactaactcagttaacctaagaattagtagctctaattcattcataaaaagagacaacgcttttttgaagtctattttgttattctgattttgacgcaagaagtttatgaacgcaggtaaattagtccccactaaagcatcaaaattatttataaattcacgtttcatttttatttcaatttcattgaaataatgctttgcactttccagctgctttctatcaagatcgttaatcaaagccattagagatgatgttaactcttgtataacaaagtttgctgccgctaaaatctttgcatttggctttacaattattgattcagggtgatgacagacaaatgcaaatactcccttagcacttaatacacgaaaaacctcagagatacttttatcaagttgactgtactctagagaaaactgtgcaataacagacgaaaactcatcatctttaaatggtaaattctcaacggctgtatttgacagaaaggttccacctacactctttgaaacctcgggatgaatttttgcctgatcgattccaacacaatttaactttttgtctctttgtatcagctgaattaaggcaccattgcccgtgccaacatccagaaccaatgagtctggatctaacttagtcgcgaaactacaccagaactcttgtaatgctccttggtaattttttttaaacccgtttccaaatgaggttaggtgtccttgttgccaataatttgtccaatggtcgctcatgtatactccataaaaaaaggctgaataaattcagcctttttactttcaaaaaactttattagaagctgattgagtagcttacacgataatcacgaccaaagttattataaaggtcttggttatcccaagtaccgtttgatgataacactggatcttcatctgttaagttattaacagtgaaagtaagtgcaccgtatgcacctgcattataagtgtaagttaagttgtgaattaaccagctatcaagcttacctgtttgctcatagtagccatcaccatcttcatctttttcagtttcagtagtgctgtctgtgtatgttgcattccacgctagtgagtgatcttcataagaccatgcaaccgttgcaacagacttaagctcaggttgacctgaccagccagatgtatcttgtacaacaccacctacttcttggtcatacgaaagcacaaagctattcacgttttggaaacggaagtcaccaaaaccagtttcaagatttgcagcaattgtaaagtcgataccttcaatttcgaaaccagcaccattgaagtaagatgtacctgcttcaactagagtacctgatgcagcacgcttcagatagaaagtctcatttgaagtgtctgtatctactgatacagcagagattaggcctgcagcttcgtcagatagtaaagactgaagagacttagattgaattacattatcaatcgctaactggaagtaatcaactttgaaagtaaggttttcgtttacatcccacgcgataccaaggttagtgtaatctgaagtttcagcatctaactctgagttttgcgtgtaataagtgtcatattgacgcgatgtagttgaaccatttgcatagtcgatagctgattcagctgagaatgtacgtgcagcatttagaaggtcaagacctggtgcacggaaagactcagaatatgaaccacggataacgatgttatcagctacttgccaacgagcagataccgcaggagcaatattgtcaccgaagtcagagtagtcatcgtaacgagcttttaagttaacttctacagtttcagtaattggaagtactgactcgaagaagaatgctgttacatcacgtttaccctgtgatgagttacctgctgaaccaccgattaaaccagcagctgattgaccatcgtagatatctgcataagtttgctcaaaatattccatacctacgtagtgtgatacttgaccaccaggtaattcgaataaatcgaagccgataccagcaaagtattggtcaaaagtcgatgaagattcttgaagtgttgttgctttcatgtttgcaacaccttcatctgaacctaaatcaatatcattagcttggttataagctaaaccagaataagaaaggtagtattgaccaacagatttgttatctgctttgttacggtggtagtaaacttcccatgaagcattgttccaatcaaggaaaccacgtaaaccagttgttaaatcgatgttgtagtcgtctacgttaccgtcacgagtaccgataccaacccaacggaataaaccgtatgcaccatcttcaccgtatgggttgtgctcattgtctgcagacataccagtccaaggagcagctggaggagcataacgaccaaatgatgagttttgaacaaacattgtttgaccaaaccactctacattttcagcgatttcatagttagagctgatgtataatgtgttacggtcgattgatgctgtgttgtaagatacgtttgcaaacgcatacatacaatactcagagcctggaccccagtcttcatttgcatctacacgacggaacgtattttcaccgtactctgcaattaagtcatcacataatagtgatgcttttgcttgtgagaagtcaggagaaagaactgttgcaccgtagtaagaccaaccaacagtatctgcagtgtacgcttcgatatcaccatcgccatctaaatcaccgattttagctttagtgtaatcacgtgcaccatcactgataccttcacgtttttggtaatcgtatgcaaacgtgatgttacctttatcgtttgagataccacctactactgagaactctgaagacgttgttccttcgtcttgatcacgatgaccagcaccaacgttgaagcttaagccttcatagttgtcttttaggataacgttaacaacaccagccattgcatcagaaccataaatagatgatgcaccttcagtcatgatatcgatacgctcaactgccgccataggaatagcatttaagttagctgacgcaccacctaatgttggtgagcctgggaaacgacgaccgtttaatagcacaagtgtacggcgtgaacccgcaccacgtaagttaatagttgcttgagactgagcagagctacctgaacgctctgagaatgagccgaatgagttcaatgaacttgaacgaagagcgtcagctacagtgaaatcaccttccattttgatatcagcagatgtgatgctgattacaggtgatgcaccttcaaggtcagtacgcttgatgcgtgaacctgttacttgaatgcgttcaactttctctgcactgtcgtcttcagctgcaacagtcgatgcagaaaatgcagctgttgatgcagcaccaaaagcaatcgctaagcgaactgctttagaaacttttttatttaacatttgattctccctggaccactatattgtggctatatttagcataagcttgtttattatttgttatcacatcaggactgcgaccaacaaataataaacaaattaaacaaaatatccagacatttgtttataaaaaattaataaaaaaccacaaatgaaaccaaactttaatctatcgcgcaaaattcgtacaaagacatccatagccaaaacccttagaaatagggacaaaaagcaatattcagaccttaaaacattcgaatttgcttattatttccaaatgaaataatagtacccaaatctgcaactatcatttcagctattggcaacaattgcttattaacataaacaccataatcgtaatgatgtttacctgtgtagtactcagcgccacaatcggtgtacacatattcaattatttgcccacgcttgaagctaacagtaggatttttaactatatattgcttagctgctttaacatgaggagggatatttttttgatagtctgtcaaatgctgccctaatcgtttacggtagactaacattgagtcaaattcacctgcataaagctttttgacataattatcaaatgcttggattattaaatcctggctattctgttcactaaataaaattttgaaaagctctctttgaaattgatgagccaattcagtccaatcacttctgactgtttccattcctttaaaaacaagttcgctaattccatctttaaccacatttccgacatatcgctttttagaacccgttgtttttcctctaatcgtgggcataaaaaaagggctatagtggatttcgaactcaatttctaaaaaactgtctattttataatgttgttgtaactcgtgctgccaacgtatgtttatttttcttgccagttccgtaccgatttcattacagtcttgaggattcagctcatcaactaatttcacaaatgtcgagtcagtatctccataaattacttcatagccccattcttcaatccactgcttggtagtttgcattatttcatgaccacgcagagtgattgaactagacaagcgtggatcataaaaacggcacccttttgaacctaacactccatataaactattcataatgatcttaatcgcctgcgagagcataggttggtcattatctttggcgacctgtcttttagcagcgagctctcgaatcagttcaggtaaatgatgttcggttcgtgaaaatagcgcttgattaaaaccctctattgcattttctgggctttttaaaccctcaatcaagccaagtggatctatacaaaatgttctcattatcgatggatacaggcttttgtaatcgagcacgagtatatttctataaagccctggttgtgatggcataacatagccaccggggctgtcgaatgttaggccatgatcccccaaattgggagctacatagccacttctatgtaataaaggtaggtagaggttagtgaaagcggcaacagatccccccattctttcaagctctaaacctgttaactgacttcgtacaactgcaaaatcgagtaacctaagcttttcaaaaatacgcagtactaaaatgcaatcttgtctgttgtaactcgcaagtgaaagtttatcttcattaaactgacgaatgatctcagcaagacggtcgtcggtgctaatcagtttatcttcgccaagctcaatgcttgctacattggcaagactgaagttatcgtaatgataggttgcattttttaaggtatcgataccatcaatcacaacccgaccaggtatagttaagcgggtaaagctaccaactctcaactgcattttttctttattgcgccctaaaggtaactcaaccccaagcgcttcagcacgtgcatgtaatacagtaaaatcaaactcaatgacattccaacctataatcacatctggatctatagtttgaataagcgagcaaaggtggtctagtaaatcaatttcatcaacacaccattgaatgctaaatggcagttcactggtatcttgtggctgtcctatcattaacaccatatcgatgttttcgcccactaagccaactgaaaatagtactccctcaccattacattcaatatcgagtgacaagcttgagaatcgaggcgtaaactcgctattttttttgaatttagcatcagttaatactggatatgggtggcttttaattaaacgacctttggcccaaacagatcctctgataaaacgctccattaaaaacctatcgactgggcggatatcatcttcatagacttttatatgctgtgctttgagtcgtttagctgcgttgtaataatgtttcaatgaagagaaataacaagaaaccacttgttgctgcatgaagcttttaagcttcacatgcttaatttcgcagatgatcccatactcgttgaacacgcttgttgcagcgtctaattgtgatttattaataaaaaacacagcgtgttgtaaagagctaattagctttacaggcccctgctgagataatatccacaccacaatagaaatgcctttagcgctatcatagcattgggtggaaagaataaagccagaaactaactgcatgttattagaccttttttcggaaatttaggcattttagttaaacaaagctaagtggattagctaattaaagtaacaagtcgcttgtagttgcccagttaaatctctaaaattaattactgtaattatatacatactttaggttatctgggcatgctttctgactctttaaaaaaaacaattcggcaaattcataagcatgttgctgataacctcaccgattaccgccctagaagtagtcaaaactatttagttgccgaaatagcaaaaacgctggctggcgagtaccataaaagccaacgcatctgtgttattgaagctggtacaggaaccggcaagtcgctggcttattgtttaggtgcaatgcctttggcgatggccaaaaaaaagaaattagtgatttcgacggccaccgttgccctacaagagcagttaattaataaagaactgccgttttttaaagaacactctggccttgatattaagtttgatttagtgaaaggacgacagcgctatatatgtgcgcaaaaactcagtgctgcagtaaatggcgatagccaaacgcaaatggagtttatgccgaccctatcatcgccgctctcagatatggaaaccaaatgcttaaagcaactttatgatgcttactcaaaaaagcaatggcaaggtgatcgcgatagttgggctgatactatccccgataaagtttggaatttaatagcctgtgataagcactcatgccaacgacaaatgcgtgctcatcagctgtgcccttttcatatggcgcgtcagcgtcttatgcaaatggatgtgttggtgatcaaccattctttactgctggctgatctagacctcggtggtggtaagattcttcctgagcctgacgatactatttacgtaattgacgaagcgcaccatttagctcacatcacccgagacttctcatctgcagcagcaacaatcaaaggcaccatagattggctcgacaagcttgttaaattcgctggtaaaatggcaaatgtattagtaggacaaaaagcaattgggcaaaattttaagctgagtgacagtatcaatgatgctgcaaaaaacttaaaagtcgtacgtgatattcttgataatgcggattttagctacaacagtgatgatacctatcgttttgagcacggtgagatccctgcatctttacatgctaaagcaaaagatatcagcgatgccactcttgatgctctaagagcactaaacaaaatgcacgataccttggtacaagacgtaagcgatggcgatataaaaccttatgtagctgatcctatcttggctgaaagtggtcattacattaaccgtctagagttattaaacaaattgtggtttagttatgcaacaaaaggcgaaggtattccccatgctcgatggatcaaacgcctagagtataagaaccatcacgaccacttactcagtgattgccctattgaagttggctattacttaaaagataaattatggaatcaatgtgctggtgctgtgctttgttcagctactttaactgcacttggctcatttgatcattttgcttatgaatgcggcctagccaaagaagaaggcgtcaaatacatcaaagttccctcgccgtttgattatcctaaacaagcaacactgcatattcctgcaagccacatcgagccaacagataaagcctttagtgatcacttggctgaacaattacctaagtttcttgatgataaaaaagctaatttagtcttgtttgcttcttattggcagatggatcacgtagtaaaagcactgcgcagcaaaggaattgacgtattagttcagggtgaaatgtctcgagaagcattattgaaaaagcataaagcgaatgttgacttaggtcgcgcaagctacttatttggcacacaaagcctatcagaaggtctagatttaccgggtaaatacttagaaaacctcgtcattacaaagattccgttcgcggtgcctacctcacctatagaagaagcgcaggctgaatttgtgcaaagtaagggggggaatccatttttgtctattactgtacctgatgcagcaaagaaattagtacagagctgtggtagactacttcgaaaagagaatgatcaaggacgaattattattcttgatcgccgtttagtgaccaaacgatatggcaaagccatgctcgataccttgccaccctttaaaagacaaattgattattaatgtttgaattagctttagatccaacaacatgggcactcctttgcgcagtagcgctggctgcaggctttattgatgccattgctggcggtggcggcatgctaactgtaccagccttattgacagccggtttaccaccgcacctcactctagggaccaataaacttgcagccagttttggctcattaactgcaagtgtgacatattttcggaaaaagttatttaacccccggttttgggctgcgtctattttagcaactgccataggggcacttgtaggtacattagttgtagattacttgagtattgagtttttaaataaattactaccggtggtgattattttagtggcttgttacagtctctttggcagtttaagtacgactgagcataacgaattacctgagcttgatggcaaaaccaaaattaaacaatggctacaaggacttggccttggtttttttgatggtttagcaggccctggtactggcaccttttggactgcctcaaatagcctattatataagatgagcttattgctaaattgtgggcttgctcgctcaatgaactttgtttcgaactttatttcattgatcacctttgttgcgctgggccatgtgaactttttgcttggtataacaatgggctttttcttgatgttaggtgcctggttaggtgcgcattcagcaattaaatttggtagtaaaatgatccgcccagtatttaatactgtggttatagtgttagcattaaagttaatctatgaggcttatttgtaaatgcattctcctgcttttgacaaactatgcgagcaaatatctaggcttaaacatcaagcaagccaatttgataacggcaacctatttgctaaaaatcgctacatgcaggcacaaccaagtttgtttgataaggcagtatttgcgactaaaagtatgaaacttgcagattatgtagttgaaatagaagaagagttagctaacctgcccccagcagaacatcgccatgcttaccaatatgctttagagcgaattgcacagcaagttcaggctgtttttaatgttattaaatcaacacctgtgtgggcaaaagagaacaaatacagttttaaacccaagagcaagccacaaatatataaacaagcagttaaaaagatcatgcagtcttcacatgaactttacgatgagctcaagcaaaaccatgagtttgagcgccgcttagttttaatgattgaagaaagaaagcttcaacttgatgcagctagcccagcaaaggccactgaaataaataaagagatcttagctttacacgctcgtttgggtcgctgtcgaaaagcaatttcagccactgaagataaaattcaacaagtagaaaaacagcagctgagataatgttttactaccacccaagttattcagcgttagctttacccgagcgtcaccgctttccgattgaaaaatatcgcatgttaaggcagcttgttagcgactttattgatgaacagcacttcattaccccacaaaaagccactcgcgcgcagcttgctctatgccatgaccctgattatgtcgacgcttttttaacaggtagccttgacagcaaagcgataaaaaaaatgggctttccttggtctgaagccttagtcgaacgaacactctattctgtcggtgcaagtattcaaggtgctgaatttgcactacaacaaggtgctgcatttaacttaagtggcggttatcaccatgcttttacgagctatggtagtggtttttgtatttttaatgacttagcaatagccgcagcacacttaattgagagcgaacaagccgataccgtattaatctttgactgtgacgttcaccaaggtgatggaacagccgaagtgacacaagcacaccctcaaatcattagctgctctattcattgccagcaaaactttccgcgtatcaagcagcaatcaaattacgactttgctttagagcatggcacctcagatgctgaataccttgagacagtaaatcaagcattagccttaacaattagactccaccagcctgatatcattttgtacaacgccggcgcagatatcgcaacggatgatgagttaggacactttcaagtcagtttagagggcgtgtatcaacgtgaccatttagtattaagccaagcaaaggaagcaaaaatcccactctttgcagccatgggcggtggctatcaacgaaatgtaagccgtttggttgatgttcatggtcagctttttagagccgctgtcgatttattctaaggcttggtatacacttaaatatgacttttctactaggttgttggtatatgaaattgcatgatgacatccacaattactatgaaaaacttgttattgaagatatcgctaagcgcaagttagattcgttgtataatgatgatattatggcggatttatgctgtaccgtacttaatcaattacctgctcgctatattcgctatgacgttgatatggaattttatttaccacaaacagagcgaataaaaatggagcaacgcgtacaaacagctatcgatgtagccatcagccaagttgcgaaaaaaaaggaattacagaatgcgcagtgacttagaaaatgctcctgactacataaaaatcgctgttgatctcattatgctcttagagcaaaacgatgtgcctgccgaagacgttttagcagcattagaaatcgttaaatctgacttcgaaaaaaaacttccacaatcaactgattaatagtccgaaaatggcgagtattggggcataaatttgttatgctcaggttttaaaaattaagaatgtaaaaccatgtcattgccaagtttattacgcctgttcatccttgctgctatttggggcgcttccttcttatttatgcgcatggcagctaatagcttaggccctgcggtattaattgagctaagagttggctttgcagcaataacactgtttatttttgcgttgtacttacgcaagaaacttgcgttcgcgactcacaaaaagcattttttcattattggtgcgcttaattccgccattccctttttattgtttgcttatgcagcacaaacaattaacgcttcaaccttatcaatattaaactcaacaaccccaatttggggtgccatcgtcggtattatttggagcaaaactaaacccactaaaagtatgctgctaggcttgctgttaggtttaacgggcgtggccattttagtggggcaaaatagtctcactatcgacagccaagccattacggcaattgttgctgcgctgtgtgcttcactcagttatgccattgcatcccattacaccaaacatgcaccaaagttgtctgcttttgataacgcgcatggcagtatgtgggcggcaagtatcatggtactcccgcttatttttattattcctgccagagaaatgccaagtaacgaagttatgcttggtgtagtggcactcggtgtgctgtgtactgctgtagcatatatcctgtttttcagtttgattgatgatattggaccaacctcagcactgactgttacctttttgattccactatttggcataatatggggtaatctaattttagatgaacaaattgggccgaataccttagttggcgcactgtgtgttatagcaggcaccatgctggtcactggctttatccgtatcaagccgtttttaaaacgaaacaccttgtaacagaatgcaaattgcatttttaaatacaatctatactctattataccaattcgcttaattaagtagtctattttgaggcaataaaacctcgttgataacaaggcaaaaatttcgttatttagttgttctaaatgagaaatttttaacgcagttagcgacaggtttaatccctcaaaatgattaagtattatagtgaattggtattgggtactaaaaaggaaggagaagtgtatgtcaggtactaccatggtggtgttaattgtgctgatatctgtgggatctggggtgatttatgatatgtataaaaagcatctcgaattcaaatcacgcaccttaaaaaattcaaaagaagcgaacgagcatgtagcagaagtgacaaaagagctgcaagagttaagagagcgtgtgcaaacgctcgaagccattgtcaccgattcaagctacaacgtaaaacaagagattaataaactttaattaagttagctctaattaagataataatgcactgtattgttcaagcactggctgataataatcggcgtcttgatttaacatgcgttggtaatgagcacataactgctttaaataagcttggtgctctttgcttgttagttgccacatttgctgcccaatgcgggtgatgatctgcgatgataacgcactcattacgatgatttcgtaaaagcgtttattttcacaaaccaactgctcagacacgagccctaattgtagtgtttgtaaataactgcgaacgtgataactgtgatgtacagggcaaacaataaagtcgatgtaagtatttgggttttggctaacaatcttcgttaaaaactgtactaacagctctccccctactcctgcaataataactaggtggcgtttttgtgggtctggtgtaatcgctgcaacatcttggcaatgcacctgccagcgtccgcgttgctcttcgttgcaaaagcgttctagtttatcatttagtgcctgcattaactcaggcactatatcaacgaaatgtattaactgtgctttatcttgctgtaaaagctcaatccctaacaaaccgtggtcgcagcagcagtcccagatttcgtcataacctgaatcaactacatcaacgatggctgatagtcgtttacttagtgccattagtttgctgttttataaactaaagcttttagactacgatcactgtctacttcaacaaagccatcggtagctgcgagtcgctcaacaaagctaattgccccttgcgtatgatcgctaatgagatctttaaacgcctgctctgaaagctcaggactattcgcacacagtagtaattgggtgtgttcattcaatagctcgggtaaacgacgcagaattttttgataatccttggtcaatataaagctgcctttttgaaagctaggtggatcaacgatgatcaattcatacggcgcagatttctttagcttaccgaatgactttaaaatatcgtgagggaaataactaacaccttgctcaaaaccatttaactgatgattttgtttacccgttcgaagcacacctttattcatatccatatttataacttggtcagcaccaccttgcattgctgcaacagaaaaaccacaagtatatgaaaacagattgagcacttttgcgtttttactattggcttgaacaaactctctgccacggcgcatatcagggaaaattcccgtattttggcgactcagtaaatcaactttaaacttaatgccgttttcactgacaaggtgttcttgtggtaattcgccaaacattagcgcattacgggtattaataccgctacgttgctggtataccaatgcagtaacaagctcaggcgcgttctcttgcgcccattgccatagggtatctgttaattgcgcaagtgcttgttcttcaatttcttcatatgaaactaaaaagagtgcgggcggataaaaatccaaattaatgtggctcagctcagccactgagtggccacggccatgaaatacacggcataattcattagcggcaagtggcgcctctgctaatgcatttaaaatggcagaaaaatcgtttgtcatcatctttagttaattaactgttgttgtaattcgtgaatctcatctcgcacagaagccgctttttcaaattcaaggtcgctggcataggcatgcattttcgcttcaagggctttaatttggctggcaatatcttttgcgctgagcacttttttagactctttacgcaccaatttaagattatctttaggacttgcttcttcacccacatccataatatcggtgatacttttcaccagtgcttgcggctcaataccgtgctcaaggttataagcttgttgcttttcgcggcggcgatctgtttcgtcaatggcttgtcgcatagaattagtaatgcggtcgccatacaaaatcgctttaccatttaagtgacgagcagcacgacctatggtttgaataagcgaacgagtagaacgtaagaaaccttctttatcagcatcaagtatcgcaaccagtgaaacctctggcatgtcgagaccttctcgtaataagttaatgcccactaacacgtcaaatacaccagcacgcaaatcgcggataatttcgacccgttcaacggtgtcgatatctgagtgcaagtaacgcacttttacatcatggtcgttgagataatcggttaaatcttctgccatacgcttagttaaagtggttacaagtacccgctcgttcacttcaacccgtttatagatttcagagagtaagtcatcaacctgactaccaacggggcgaacttcaatttctgggtcaataagcccggttggacgaataacctgctctgcaacttctcctgatgaacgctcaagctcaaaattacctggcgttgccgacacataaatagtttgcggcgcaatggcttcaaattcttcaaaacgtaatggccggttatctaatgctgatggcaagcgaaagccatactcaacaagattttctttacggcttctgtcacctttgtacatagcgccaatttgcgacactgtaacgtgtgattcatcaataatcatcaatgcatcatcaggtaagtagtcaagtaaagtcggcggcggatcgcccggtgttctaccagataagtaacgcgagtagttttcgatgcctgagcaataaccaagctcggtcatcatttcaatatcgtactgggtgcgctgcgcaatacgttgctcttctataagtttgttggcactgagtaattgagctcggcggtctttcaactcatctttaattttatctatggcatcgagaattttttcacggggtgttacatagtgcgttttcgggtaaatagtcgcgcgtactatgtgcttctcaacagcccctgtaagcgggtcaaaaatacttaagcgctcaatttcatcgtcaaacatttccacacgaacggcataagtgtcagattcagcaggaaatatatcaactacttcaccacgaacacggtatgtgccacggctaaattcaatatcgtttcgtgtatattgcagctcagcaagacgacgcagcatatcgcgctgatcaacggtttcacccactttcagcaatagcatcatcttcatatatgagtcagggtcgcccaaaccataaatagcagataccgaggccacaattattgtatcgcgtctttctaaaagcgctttggtagcacttaagcgcatctgctcaatgtgctcattgatagacgcatctttttctataaaagtatcactggcaacaacataagcttctggctggtaatagtcgtaataagatacaaaatactcaaccgcgttatgcgggaaaaactctttcatttcgccataaagctgtgcagcgagtgttttattgtgtgccatgataatggttgggcgattcaaatcattaataatattggccatggtgaaggttttacccgtccctgtagcccctaataatgtttgatgagcaagcccagcctcaaggccatcttttaactgtgctatcgccgttggttggtcaccacttggcttaaatttagaaactagttggaaatggtcgctcatgaatgacactccttcatatatgactcacttaacccatcaacttctttgatgaaccatttataggctaccactgccgtaaataaattaccgatggctgcaccaataaagagtccttttaaaccggcaatttcactgccaacataagcaaaaggtacataaaaaacaaacagacgaaccacacttaaaatcagtgcattcattggcttatgcagggcattaaatgaagagttagataagataattattccttgcagaccataacttagcggcaaaatataaatgaatagcttaatcacatccattactgcttgctctttaccaaatacatcagcgataaaaccagaggttaacagcagtaaaatataaatagcgaactgccaaatcatcacaaactttaaagtttttgtgtaggcttctttgacacgttcaaacttacccgccccaaagttttgactaacaaatggcggcaaggtcatcgacaaagcaagtactacaaggcttgcaattgattcaattcggcttcctacaccaaacgctgcgacggcttcaggaccatgtttagccactaatgctgtcattacagccattgcaattggcgttaacatatttgcgccagccgcaggtaaaccaatttttaggacttttcgaattgagctcaatggcgtttgcgaaccagcatgcaaacttaacaacccattcttaacagcaagaatataaaggatgataattactgccactgcccaagctatgacacttgcgatggctgcaccttgaattcctaaagcggggataggcccaaagccaaaaataagcatagggtctaaaatggcattaatgagccccgccccacccattactatgctcggtgttttagtatcgccactggcacgtagcacagagtttccgaccattggggtaattaaaaacacactgcctaaaaaccacacactcatgtaatcatggatcaaaggcagtactaactccccagccccaagtaatttaaaaataggttcgataaatacataaccgacaaccgataaagaaaacaccataacaacagcgacaagtaatgacatacttgcatcaaagcgcgcctcgtctagcttgtcgctgccaagtgcttttgcaataactgctgaagtgcctattcctaaaccgatagcaaggctgataacggtaaacgtcacgggaaacgtaaaactcaccgcagcgagaggttcagttccaagtaaactgatgaaaaaggtatctaccaaattaaacatcattagtgtaatcattccaaaaatcatcggaatggtcattttctttaaggtcggcagaatgggagagtttaaaagatcaggtttagatttgctctgcggtgtcacgctcataagaatattttgcctctttatcttagcttgtaagtttaaagcatcctcggcttgcaagctatgctttattaaaagaaacaaacgagatagataaaactccttattttgatgctttcattgataaatagtgactaacccctataaaaaacaaaatacaaacatcattaatatctttattacaattaaaaggcagatatcgctgtttttttacacactaaatactgttgtttcatcgtcacaaataattttactaatcaattcagcacggcttcaggtaaaaatattaacccactgatttaattagatttaaaaaaactgaattaaatacttgaaattgctagagcgccctatatttctggcatcaacgctgttcttaaagtttcataaacagagttatccacagaaatcgtggataactctctgtaagccgcaaatataaaggcttttaacagctatcgatctttgagttaagcttaaagactgaagtgtattattttaagccttttaattgttccgcaatagaaatcagcaaaaatttctacagcctgaaccaaaaatgaaaacaacaaacaaggatgcagtagctttttttcaaactaaacaactgatttaaatgattaaaaaaccaccaactaagctttgttaaactgccatatttatttattggcaaaaaaacctatcgtttctgtgagataaatacagctaaaaaatacgactcgatacagttacaaacataccggtgtttaaaaattcagtactgtcgttttgtgataaatacaaatactagataagtaattattttctccgttaaattgtaaaaaacatcttaactaatacttttttgacgtttaaaaccacaagcctgctcaaaaaaaatgcaatgatagcgttttagcgacataaaactttaactgaatggcgctatccaacatgatttcaagccatattttgctcagatcgaacataaaaacatcgaataagcttcttttttgaatttatgaagtttttatgttgacactttgcaatgctgtcattaatatttcgccccgttgaaaggcatgacgcttcccccttagctcagttggttagagcgacggactgttaatccgcaggtcccccgttcgagtcggggagggggagccaagtttttcagccataaacgattcccccttagctcagttggttagagcgacggactgttaatccgcaggtcccccgttcgagtcggggagggggagccaagtttatgaatatgattgttcccccttagctcagttggttagagcgacggactgttaatccgcaggtcccccgttcgagtcggggagggggagccaaatcatagcaccacactactctatttagttcccccttagctcagttggttagagcgacggactgttaatccgcaggtcccccgttcgagtcggggagggggagccaactccaagaatctattaaactttcatctacaactattcttcgattgtattagactttaaagcgcatataatctactctactttaagtaatttctatactttgctgtagaatatgatgcaaaattattacagcaatgaatcaaggaattgattccttccttttcgcttttaaaagataagaaaaatggctggttttaaaaaactaatatttatacaacttatatcttggttactgtttaccgttttaggtggctatctagttgctcttagttttgatagctcagtgagtgatacgcaaaaaaaagcacaactgaccgttaattcatacattagcgacttaacaatggatgacttatctgcagagaaaatccaacgtacatttgctgatgcgagtatcttttcaagctttactcttcgtgatcacgcaggtaaaacccttgtagcagttcaatcatcagagtcgcttccgcttctagcagagatggttaacagttcatttaattctatccgtccgcaatttgctgttaacaacgcttctgatataaaagttgaatttactattaatgcacaaagccttgccaatttaatgcagcaggcgatgttcgttgttatcttagtttctggtcttattgcccttctccctattttctttatgaagagcatgtttaaacgacttaatcgtaaaatcagcaccactattgctgatattgttgatatatacattaaccagaatcaggtaggtggcgaccttgaacaagcgatagacacgtcgcgaattaaaaagctaagtaaagatttaatcccttcgtttaatcgtttgtctcactttttacagacaaaacatgatgatattcaaaataacgcgttaaatattaaaaaagaagcgtacaaagatgttgtaaccaacttaggtaaccgcaacatgtttgttgagtattacgagaaaaatattgaaaactcagataaaagcacctttggctcgcttgccatggtgcgttgcagtgagttacaagcaataaaccaaacccgtggctaccagaaaggtgacgagtacgttaaaggtgttgctgatatcatcaaacatatcagtggcacgtacacgaatagccaagtttttcgtttaaatagctcagattttgctgtggttttaccgaacacaccactaaaagaagctgaacgctttggtgataatctacaatctcgtttcactcaatatcaacaaaatcaagaattaagctctgtagcaaatacaggtatcgttggttatgaaaaaggtaagcctttaggtgagctgctttcagttgttgataatgcaatgagtatggcgcagtcaaaacaagcaaatgcttggcatgtacaacgagaaacagacttagtaaataatgctagcgcaggttttggtaaccagaactggcgtaaagtgattaacgaagttattgaatctaaacgtgtacatttagtaatgcaaaatattatgccggttggtaagagcgttaaagcttatgctgagattcaagtaagatttaaaactgctgagaaccaaacattaccaacggcttcatttttagctatggctgaaaagctagaaatggcaatggaaattgatcgattgattatcgatactactctggacaaaattaagactcgtaatttttctgagaaattctttggcattaatgtaactgcatcaagtgcccataatgatcaatttgtgatctggcttgagcgccgcctattaaaagacagtaatatcgcctctaagcttatatttgaagtgagcgagtttggcttacaacaaaatattaaagcaagtaaacgctttatcgatatggtgcatcgtgtaggtgcgcgtatcactgtagagcgttttggtgttggtttaacgtcatttaaattctttagagacttaaaacctgatttcatcaaaatggatgcaagttatacccgcggccttgaagaagataaaaataatcaatattttatgcgcttaatggttgatcttgctcaccgtattggcgtgagtgtttttgcagaaggtgttgagagccaagaagagaaacatatcattgaaactttatgtttagatggcgtacaaggctattacatcgaaaagccaaaagacatttaagccccctactcatggcccaaaaaaccacacgttttttgggcctattctattcattaaccttgctttaacagtttaatcataaacagctttgttaattttagctattcgtccctgatgtgttgtgtcagcccccagaaaaaaggataatagtgccgattttaaactcgtgaggcacgcatgacagaatatgtcttgttattgattggcaccgtgctagtcaacaactttgttttagtacagttcttaggtttatgcccttttatgggtgtatcaggtaagttagataccgcgatcggtatgtctttagccacaacctttgtgcttacactagcttctgtaacgagttacctagtgaatcattatattttgattccacttgatatcgcctttttacgtactatgagctttattctagtgatagcggtagtcgtgcaatttactgaaatggtggtaagaaaaaccagcccgacactttatcgcttattagggattttcttaccgcttattaccaccaactgtgccgtgttaggtgttgctctactaaatatcaaagaagatcattcgttcttgcaatctgctgtgtatggttttggtgcagctgttggtttttctcttgtactggttttatttgcagctttacgtgaacgcttggcagctgcagacgtccctgcaccatttaaaggtgcgtcaattgctatgatcaccgcaggcctgatgtcgatggcctttatgggttttacaggattagtgaagttttaatatgaccttgttttatgctttgatagcgttaggttcattagcgctaatatttggtttaattttaggttttgccgccgtgcgttttcgcgttgagagcaaccctattgttgaccaaattgataccattttaccgcaaacacaatgtggccaatgcggctaccctggctgtcgtccatatgctgaagcgatcgccaatggtgacgaaatcaataaatgcccaccaggcggcgaagccacggtaaaaaaactcgctgatttaatgggtgttgaagcaaaaccgctggctggcggtgagcaagcagatcctgttaaaaccgttgcctatattcgtgaagatgaatgtattggttgtaccaaatgtattcaagcctgccctgttgatgcgattgtcggcgcaacccgccaaatgcacactgtattaatcgatgaatgtactggttgtgacttatgtgttgaaccgtgccctgtagactgtattgatatgctgcctgtaaaagaaaccaaacaaacttggaaatggcaattaaacgcaatccctgtgactcaggtagattaggagcacagatggaaaagttaatagatcaaattaaacaaggcaaagtgtggtctatacctgggggcattcacccaccgggtcaaaagctgcaatcaacaacacacgcaattgcaagactgccactaccagataagcttgttgtatctttaaaacaacacattggtgctaacggcaaactaattgttgaaaaaggccaacaggtacttaaaggccaagcattaactaaaccgagcggtaattggtctgtgcctgtgcacgcaccaacatctggacttattagcgatatttgcccaatgccatctgctcatccatcagcattgcctgagcttagcgtgattattgaacctgatggtgaagataaatggtgtgagcttcaccctgtgtctgatgcaaaaacactttcccatgatgagcttgttgatattattcaccaaagcggtattgcaggtatgggcggcgctggtttcccaacttatgtaaaagcagatacccgaaaagccattgagtttttaattgttaatgccgttgagtgtgaaccttatatcaccgctgatgatatgctaatgcgcgaacatgccgatggcataattgctggcattgaattaatgcagcagctgttaaatccacagttaacgattattggcatcgaagacaataaacccgatgctattgctgccatgaaacaagcagcacaacataacgacagcatcatagtgcaaacagtgccaacggtttacccttctggcggtgaaaaacagctaattaaactgctaacgggcaaagaagtcccaagtggaagtattcctgccgatattggtatgttggtgcaaaatgtcggtactttgtttgcggtaaatcaagccgtaaatgaaggtaaacctctgattgaacgcgtggtgacagtaacgggtaacaccattcataaacagggtaatgtgtgggctttactaggcaccgaaataaaacatttattagattgccaaggcttttcgccagttccacagcaacgtgtggttatgggcggtccaatgatgggctttaccttaccaaccgtgcgcattggtgtcgttaaaaccacaaactgtattttagcaccagatcaccaagagcttgctgagccgggtgatgaaaaagcctgtattcgttgtagtgcctgtgctgacgcctgccctgcttcattattacctcagcaattacaatggtttgctaagtctaaagaatacgacaaactcaacgagcacaatttattcgattgtatcgaatgtggtgcctgtgcttatgtatgcccaagcgaaatccccttggtgcagtactatcgcgttgctaaagctgaaataaaggagcagcaagcagagcaaatcaaagcagagcgagcaaaagagcgttttgaagcacgtaaagagcgcttagagcgcgaacaagaagagcgtcaaaatcgccataaacgtaagccggctgctaagtcagatggcgaaaaacaaaaagtggccgatgcactcgcgcgtgttaaatctaaatctgatgataaagacagtaagtcagctgtcgctgcagctattgcccgtgcgaaagcgaaaaagcaaggtgctgagcttgagcctgataactctgaagtagctaaagagcgtgcagcgcgtaaagaacaagcacgtaaatacaaagagcaaaaagcactagagcaaggtgaagaaggcgtcgataaagacgataaaaagtctgctgttgctgccgctattgcccgcgctaaagcgaaaaaagccgcacaagctacagaagaaaacgcttctgctgaaactgacgctgcgccaaaagatgacaaaaaagctgctgttgcagctgctatcgctcgggctaaagcgaaaaaagcagcgcaagctgctgaaaatcaaactgaagctgaagaagatagcgcaccagttgatgacaaaaaagctgctgttgctgctgcaatcgctcgtgctaaagcaaaaaaagcagcgcaagctgctgagaatcaaactgaagctgaagaagatagcgcgcctgttgatgacaaaaaagctgctgttgctgctgcaatcgctcgtgctaaagcgaaaaaagcagcacaagctgctgagaatcaaactgaagctgaagaagatagcgcgccagttgatgacaaaaaagctgctgttgcagctgctatcgcccgtgctaaagccaaaaaagcagctaaagagcaagcgcagagtgacgactcttcacagcaaactaatgattcaagtgctgaggcagatgcccagccacaagctgacgctcctgaatctaacgaagataagaaaaaagctgccgttgctgccgctatcgctcgcgccaaagcgaaaaaagccgctaaagagcaagcacagagtgacgattcttcagagcaaataaatgattcaaatgatgaggctgatgccaagccgcagtctgatgctcctgaatctagcgaagataagaaaaaagccgctgttgcagctgccatagctcgcgccaaagcgaaaaaggccgctaaagagcaagcgcagagtgacgaatcatcagaacaacttgatgattcaagcgatacggatgattcaaaaccgcaggttgatgaacctgagtctagcgaagataagaaaaaagcagcggtcgctcgtgccattgcaagagctaaagcgaaaaagttacaacaagaaggaaacgataagtcatgaaactaaccatggcgagttcgccgcataatcatagccataaatcattaagccgattaatgatgacagtgattgctgcgtgtattccaggcttaatcgcgcaagttttcttttttggtagcgctgttttaattcagcttgttctcgcgctaattacagttagcgcctgtgaagccgctgtattgatgcttcgtaaacgcaaagtttggccaacactcagtgatggtagtgcgtggttaacaggcgtattactggcgttgagtattccgcctttagcgccttggtggattatcgtaattggctgtatgtttgcaattgttattgtaaagcagctttatggcggccttggctttaatttatttaaccctgctatggcagcttatgtattactacttgtatcgtttccggtgcaaatgacaagctggttacctgttagtgatttacttgcagctccgataagcttctcacagcagctgtctgttattttcaatgcctttaccagcgctggttttagtgttgatcaattacgtgtagcgattgatggcacaaccatggcaacgccgcttgataccgttaaaacagatgtagcccatcacctaacggtggctgagagcatgagtaagcctctttttaatgactggtttggccttggttggggctgggttaacctcggctttttaatgggtgggctttatttattaaaagctaacatcattaattggcatatccctgttagctttttagcctcattggccgtgtgcagtggtattggttatattgcagctcctggcacagagccaggcgtggtatttcatttattcagtggtgcaaccatgttaggggcattctttattgctaccgatccagtttctgcatcaacaacgaatagaggccgtttaatttacggtgcgttaattggtctacttgtttacttaattcgtactttcggtggttatcctgatgctgtggcatttagtgtattgctgttaaatatggcggtacctttaattgattactacacgaaaccacgtacttacggccatggggtgaaataatgatcctttcctcaatgactaaaaatggcgctattcttactgcatttgcgctcattaccacaggtactgtagccctaactcatagcctgaccgctgagagaattgaagagcaagaaaagcaacaacttgcagagcagctgcaacaagtacttgatgcccatcattacgacaatcaactttacaaagattgtgttgtgatcaccgatgagcgccttgggccacgtccagatcaagttatttaccgcgcctacaaagacaataaaccgtatgctttagtaatgcgccatgtaacaccaagtggttatagcggcgatatcaacttattaacagcggtttttgctaatggtgaaatagcgggtgttcgtgtcactaaacacgaagaaacgccgggccttggcgataaagttgaggtcaaaaaatcagactggatcacccttttcaaagggcaaaatgtactttctgaagatgacagccgctgggctgttaaaaaagatggtggccaatttgatcaatttacaggtgcaaccattacaccgcgtgccgttgtcggctcagtaaaacaagctgtgctgtttgcccaagctgaatttgataatctgtttgctgcaccaaacatctgtcaaggagccaagtaatgagccaagttaaaaccttatttaaagatggtatgtgggctaataaccctgcccttgtgcagttattaggcttatgcccgctacttgccgttacttctacgattaccaatgcattaggcctaggtttagcgacgttattagtactggttggttctaacgtcaccgtatcgattgtgcgaaactgggtgcctaaagatattcgtattcctgtttttgtgatgatcatcgcaggctttgtaacgatagttcagctaatgatgaatgcctatacatttgggctttatcaatcattggggatttttattccactgattgttaccaactgtgccattatcggtcgcgcagaagcatttgcctctaaaaatacagtgccactttcagcctttgacggcctgatgatgggacttggctttatgctagttttagtggtgcttggggcaatgcgtgagcttattggtcaaggtacgctgtttgatggtgccgatttattattaggaccatgggccgcagcacttcgaattgaagtatttagttttgataaccaatttttattagcaatcttaccaccgggtgcctttttaggacttggtttactgattgctgcaaaaaatgtcattgatacacaaataaaatctaagcaagttgttactccagaagtagaaaaaggtccaagagcccgagtaacaagtttaacttaaaggagagcacgcaccgtcactgcgtgctttacgccactatgaataaagaaaaacgctatgagattttatctcgtctacgtgagcaaaacccgcacccagaaacagagcttgaatactcaagcccgtttgaattattagttgcggttaccttatcagcacaagcaacagatgtgggtgttaataaagcaacccgtaagctattccctgttgctaacacgcctcaagcgattcttgatttaggccttgaaggccttcgcgattacatcaagaccattggcttgtttaattctaaagccaataatgtctataaaatgtgtgaaattctggtcaataaacataactcagaagtaccagaaaatcgtgaagcgctcgaagcattaccgggtgttggcagaaagactgcaaatgttgttttaaactgtgcctttggctggccaacaattgctgtcgatacgcatattttccgcgtatctaaccgcactaagtttgctatgggtaaagatgtggtggctgttgaacaaaaattagaaaaagtggtacctaaagaatttaaggtcgatgtacaccactggttaatcctgcacggtcgctatgtgtgcacggctcgtaaacctaagtgcggcagctgtattatcgaagacttatgtgagtttaaggaaaagactgagtagttaaagtctactctaaagctaacaattttaaggtgaagttgctcacctttttctatcacctcagtaagttcattttgcagattgtgccaaacacaaggtttggcacgataatcctagccattatcgctggttttggctcacctgctttttaataaactctcgcgtatcatttaacaacgatactcttgctggttcgtgaacatacatcatgtgaccaccgtgataatagtgatagtcaattttatcagcgtatataccgtgtctgtttaaggtgtattctgcatcaaaaaatggcgtgacaatatcgtaataccctgaggcaaccatcaccttcatttgcggattactgcgaagcacataagataaatctggcgcggtattgacgtatcttggctcccatccttgtccatcaggagcagtacgccagcgccagttatctgataactcagggtcgccagggtttaagtattttctcttccactgtacgtttaaatctgtacgcatgtatttcatcagtgccgctttatatgcaggcccaataccttttgacgcatcttgcttaggagccgctgttaaatcgtctcgttcatcaagcttataacgtccatcaagcaagcctactgcgacgccctcatcacgcaataactctttagcgaatctgaacgcgttaatacgtaaatcaacctgctcaatatattgtttacttagccctgtataacggtgaaggccgtcaacaatttgcgttctgtcagctttgctaagcgcattacccttaaataaggctggcagtaattcatcaactgcaaattgtcggctcgcatcaataaattctgcaaaatctcctgttgtgtctacttttttgtgataccaagcagttgcagcgagtgtgggtatgtaagtgatataagatatgatgttatcgtcaacataagggcttgaaccttgatagtctaaagcttgcgacacaaaaataatgccatttacattaatcaggtgtttgtccatcagtactttagaaaccgctgcggctcgagttgtcccatagctctctcccaataaaaatacgggtgcattccagcgattttcttttgttagccactgggcaataaaatcagcgatagaagatgcatcttctttcaagccccaaaatgctttgctctcagtgtcacctaaagcgcgcgagtaacctgtaccaacagggtccacaaacaccatatcagtcacatcaagtatcgtctcaggcgcatcttttaattcgtaaggagccaatccaggagccgttgcatcgcttggtacaacaactcgtttcgggccataagcacctatatgtaaccagttagacgatgagcccggaccaccgttccagataaatgtaacaggtctatttttgttgtcgtctgcagctaggtaatcaaacgaaaagatagcagcagttggctcttcgtttttgtttaataaataagtttcaccggctacagctttgtattttagctttttgccattgaaagtgcctttatgctgggtcacaaatttagtggcttcaggtatcgactttttaatgttgtttgattctgagacttcatctgcattaaccgcgcttgtacaaaacgcaaacaatgtagagatgactacagctttgaaattggcaacatacgccatgttttattctccctagcaggcttatttttatctgtatctggcttgagtggttttatcgctgagtgctcaattaaccttttacttgagcgattacttttacagcaagcacatgtaatttcaactatctgcgtttaacacccaaaaaagcataatctgtatcgggacaaaaaatatcaaagtattaatttcacaagctcccatcctttcgttatgctgttgagtaatgtgaaattttttatgagagttgctatgttacctttacttcgtatcttgttaattgagcaagatccagccactttgcaagagctttcaacgaacctagcaaaaacaatccctaattttgagcgcagtgatgttgatatcgacattatcgagtgcattgagcttaagcaagcgttgaaatgtgtagaggaagatggcgatattcaagctgtggtacttagctgggatgtattgaataatggcgagcgcacctatagccgttttatcgagcaattaaaaggcatacgcctagaactgcctgtctatgttattggtgacgatactaaaggcttggagatagtcaacgagtcagaagaaattgagtctttcttttttaaggacgaagtcatctcagaccctgaagctattttgggctatatgatcaatgactttgatgaccgttcagaaactccattttggaccgcctatcgtcgttatgtcggtgaatcaaacgattcatggcacacgcctggtcacagtggcggtgctagctttagaaattctccgtatattaaagacttttatcagttttatggccgtaacgtatttgttggcgacctgtcggtttctgtcgactcgcttggctcattatcagacagcaccaacaccataggccgctctcaagaatcagcggcggcgacatttgaagtaaaacatacttactttgttaccaatgggtcatccacttcaaataaaattattttgcaaactttactgcgtaaaggcgataaggtgatcatcgaccgaaactgtcataaatcagtacattacggcattttgcagtcggctagtttacctatttacttatcgagtattttaaatcctaaatatggtatcttcgcgcccccttcattggctgacattaagcaagcgattgaacaaaatagcgatgctaaattactggttttaaccggctgtacctacgatggtctgcttagcgatttaaaacaagtagttgaatttgcacatcagcacggtattaaagtgtttatcgacgaagcgtggtttgcttactcgcttttccacccgagcttacgccactactcagctataaatgctggcgcagattatgttacccattcagcacataaagtggtttcagcgttctctcaggcgtcttatattcatgttaacgaccctgatttcgatgccgatttcttccgtgagatctacagtatttacgccagtacttcgccaaaatatcaactcattgcttcgctggatgtatgtcaaaagcaattagaaatggaaggttataaattactaaatgccctgctgaatcacgttgcagagtttaagcagcaaatggcttcactgaaacatataaaagtgctcgataagcaagatttcatggatatattccctcactttagtggcgataacatgggtcacgacccactgaagatccttatcgatattagtgagttaccttattcattaaaggatattcataagtttctattagatgaaattggccttgaaatcgaaaaatatacgcacagcaccattttagttttactgactcttggcggcacgcgctcgaagatcattcgcctttacaatgcgctgaagaaactcgatagcggtaaagtaaaacttgccacttcaatgaggcgcacacgcctaccagagaatctacccgctatagacttagcctgtattcctagtgatgcattctatggcgaacgtgaatctgtaccaattagcaaaagtaataaccgaatttgtgccggattagtgacaccttatcctccaggtatcccactgttagtgccggggcaacatatcactaatgagcatatcgaatatcttaaagagttggcgggtcagggcctgacaattcaagggagctttgatggcgaaatttatgtactaaaaggtaaagtgaaaagctaaacgtacgtttaaacctgaaatacctcattgttatgcagcaatccctattcattgctgcataacatcacccttttcatagcaaacgctttatgctttgtctcaatgctactgtgcaagcaatcgaaatatcttataatccattttcaataattttaatgcgcagccttactgcgctattagaattgtacgaatttaaagacaagaaagaggatgcttaaaatgcgcttattacacacaatgcttcgcgttgctgatttagataaatcaattgaattttatacgcaggtattaggtatgaaagagctgcgccgtgcagacaacgaagagtaccgctacacccttgcttttgtcggttatggtgacgaaaaaaattcgactgtgcttgagcttacttataactgggatacagacagctatgatttgggtaatgcatacggtcatattgctatcgaatttgatgatatttataaagcttgcgaagacattaaagctgctggcggtaatgtgagccgagagccgggtccagtaaaaggcggcacaactgaaatcgcatttgttaaagaccctgatggttatgcgattgagttaattcagaaaaaagataacaacactttttgatatataaatactggctatttcagcgattgctgggatagccactttgcgagtactttttctagttcagcaaaattaattggctttgcgatatgatcgctaataccaacttttgcgcttgtttcgatgtcgtctttcattgcattggcactaatcgcaataatcggcgtattaaaatctgcccttgcaagtaaatttttgctggcagttaagccatccatcaccggcatttggatatccattaaaatcagtgcataatcctgtgttagagttttttcacaagcaatttgaccattttcggccaattcataatttagacctaattgagttaaatacttagtaataacaatttggttaatcgggttatcttcagcaattaatattggcctgctgaccgctttaaaatcgaactgagtgtcttcatcaggttggtgtacttttgcgttagcgtcctgtgggtttagtgatttaaaattaacattaatcttaaactcggtgcctttaccaagttcactaacaatcgcaatagtgcctcccattaaatcaatcattcccttactgatggcaagcccaagaccggtccctccatattcacgagtggtgctactttgcgcttgtacaaagggattaaacaaagccgttattttatcatcagcgatacctatgcctgtatcttttaccgataacacgacggcagtttggtgttcatctcggctttgcagagtaagcgaaacaatgatctccccttgattggtaaatttaacggcgttagagagcaagttaatcagcacttgtttaacgcgtatttcatcacattctacattcagcgattgtaatgaggagacctcgagccggcagccaacccctttggcatcacaactcggtttaaatagtaagataaggtcatggcaaagcgcgactaaatcacattgtcgcgactcgagctctattttattggcctctatttttgaaaagtcgagaatatcgttaatcacggttaatagcacatcactacagttatttatttgccttacaaactctgcttgctcttgtgttagcgtgcttttattgagtagctgcaaaaagcccacaataccattcatcggagtgcgtatttcatggctcatattggctaaaaattggcttttaacttgctcagaacgctcagctcgaagcttttctaattgcaacgaagtaatttgtatatcaatggtatcagccatgctgctgagcgaatctgcaatatctttaaactcttgataatgaaaatcgtctgtatcttgtttgtaattacctaatgcatattcacggctaagagcagtaatacgatttagcgggttatggagtcgtgccgtcaaccaacgcactaagaaaaatgaaatgatagagagtcctacaattaacaaccctgctaatatggccgtttgctttacagcgctggtgtaagcagtttttgcttcatttatttggaactgtaaactggttagcttacctttataataaacattactgattgaggcctgctccattaatttgccgtaatcgccagcatcacccacactatataaaatgttttcttgtgctgaaatttgtacttgcttacccgcttgataaaccggttgctcattatgtatagcaagccactttaacgcctctgataaaggcacaaaagatactaacacgcccgttttaattattggctcactgagagaatcttgctcatgtagcaaggtagatgtaatagccagtaaggcattttgtgttgcctgtagaggtgcgagtagctctgtgacttgtggattatcgataatttgaattgtgttttgctctgttgatgcttgagcgctgtcgagaatgcttttagtgagtttgtaattcaaatttaaagagctaatcggataaccttcaactataaacccttgattatcaattactatcgaggcttttatctgtggattttgggcaacaaactcttgtagctgcacaagcgcgaactgtgagtacaccactttattgggcagttcagtaatcgccttagtgctactaagcaattgactgtttttctctagtttgaatagtagctgctcgaggctggccgcattatttctagcttgccactgtaaactggtgttggcttgatcaatcgagcttaaatagaagcgccctatcatcaaacctgcaagaataaataagggaataatgaccagtagtaaaacactgataaacaaagcgcgactaaagcgtggactactcattcatttccttcattggcaatcgagcgctctgccaacccttgcataaaaagccccgcttgctcagcagttaaggcaccactgccatagcgaataaatcctttatttaatacctcccacacgatgatcatagatgcggtagagggcataggttttgtgaattgtatggcatcagttaaggttgctaactctgtgccttgttgtgcttttaggttatttaaaacctcaatgttaattggaatatcttgaagcttttgccaaaccagtgtttggaatttttctgcttgaaccaatttagcaaatttaaataagctttctttatttgccccgtttaagccatcgtttggaaacgccagtacaaaggtagagtaataaggctgcatatactcaccattaagtttaggtaactgttgcatccctaaattatcaccaagcgtctgttcatacgtttttaatgcccatgcaccatcaatggtgaaggcggcttgctgcgctttaaatgcattatttgagcaagtgtaatcgcactgtctatcaaccaggttttgtttatttaaatcccaaacaaatttgagagcagattgcattgctggagtgtttaactgaacctgattatctataattagctcaccattaaaagccgataaaaacggaataaaccagtacatttccataaaactccacgtaacaagtttaacctcttcaggcaaggatgattggaaactatatatatcctgccagttttctatcggctcttttacgtactgcttattataaaaaagtaacaggtgattgccttgaatgatgggtatacctaagagcttattgtttagctttgcagtttctaaggttcgcttgtctgtggtgtcagctatgagtgagtctgggataacgctatagttggcatatttatcaaggcctaaatgatctgcgggtacaataattacgtctgttgatgtgctggtactggcattttgtaccaaccttacttttagttctttttggtcaaccaagacggaattaacagttaaaccactttgctctgcgaactcactaagcaattggttaaagtgttcatgtttcatggtatgggctaggtttatcgttgctgaatagctatcaaacgtcactattagcatcgccatccaaaatactcgccacacgctaacatctacttaaaaagagtgaaattaccctttagttaagcacatatgccgtaggttgcctagcttaatcaagggttttcttaaacctaaatgcagccacagctaagcccaaaatagtaaagactgaaagccaaattaagtcattactcatgcttattaggttaacctcttttagcactatccctcttattagccttaaatagtgcgttgcaggtaagcattctgcaagccactgcgcaacctttggcatgccttcatagggaaatacaaaacctgataatagaatcgagggtaaaagaatgaaaattgtcatttgcattgcttgaagctggtttttagcgatggtcgaaagcactaagccaagcactaaactggcacatataaaagcaaaggttgcgacaaccaatgcaactaatccacccccaaaaggaatatgaaacaagagcttacccatgcctaaaataataaataactgaataaaaccaataaagatataaggcactactttaccaatcatcaattcaagtgagcttaaaggtaaggtgattaaaagctccatattacctcgctcttgctctttaactatggcagcagaggtaaacataatcatcgtcatggttaaaatgacagcagctaaacctggcacaatattaaccgctgagcgctgctctgggttataaaataaggttgtctcaaaggttgggtaagttctattcgcaggcttatcaagaagctctgcaaggggcatatttcgtagcgattttatgctcgatgctaccattgtgtctgagccatcaactaaccaatgcgcaattggcctgactaacgactcattactaccatcaggtaaaccaaaaccagcggttgggtgctgagcaagtcggtttgccacatcgtgaggtataaagaacacggcgcggactttcgcactggcgattgctgtttgtgcttgctctatactgtcgtaataatctgtcaccttaaccacatttgtggctgatactgtttgtactaaaatgcgactgagcgcggttttactatgatcgaccacggcaacagggatatctttcacgttggtgttaatagcgtaaccaaatagaatcagctggataagggggatcatcaccaccatcgcaaatgtcattctatcgcggcgtaattgtaataattctttgcttacaattgcttttatccggcttaatgaagtgataattttcattgtctgccctgccctgtgcaggttacaaacacgtcttcaaggcttgggcgaacgctatttacttgccatgtatcctggcagaatgattgctgttttatgaactcaacggggtcttgaacatctttttttactaatattcgcagctgtgcacctagctgagttgcagagataacatggtcgattgttgtgagttgtttttttaattctctggtttgcgcccctgcgatttctactacatgagcatacatgtctgtcattaattgctttggtgagccatccgcgcgcttaatacctgattctaaaatggctaaacgatggcaacgctcagcttcatccatgtagtgagtggtaactaatatggtggtaccagcattacttaaatcaaacagtgtttcccaaaagtcacggcgattttgtggatcgactgccgatgttggctcatcaagaaataaaatttttggtttattaatcactgcagcagccaatgctaagcgctgtcgttggcccccactcatacttccggccatttgacttgctctttgatcaaggccgtaggtgtgaagtagttcgtctattctttgttgtttttgctgtttttttaaagggtaaagcgccgccatgaatttgaggttttcaagcacggtcaagtcgctataaagtgaaaacttttgcgtcatataaccaagttgtgttctgagcctttcagcatcttttggcagactcaagccaagcacattgatatcaccagaagttggcttcaataacccggtaagcatacggattgcagtcgtcttaccacagccattagggcccaaaaagccataaatttgcccttgttcaatgtctagatcaaggttatcaatcgcttttaagtcgccaaattgttttaccaaacctttggcctggatcaccgattcagtcatggcataatcacttgagcaggtacgcctgtcggtaagttattttcacttgcgggtagtgttacctcggcaagatacattaatcgcgcgcgttcttcttgatttagggcataaaaaggcgtgaacgccggctctgtcgcaatccaggtcagttcgccctgaatatttttatctataccatcgacgcgaaccgtaagtgtcatgccctgattgagcttggcacgatatggttcagggatataaacgcgtgcgtaaggtgcgctatttgcttgaataataacgactgggctgcctttggtaactcgctcacctacgtgccaaggtaaattatcgactctgccagcacgcatggctttaattgtcagatctgagaggtatttttgctgtacttttagttctgcttctgccgcctgaacttgcgcttttgcactattaatatcttcaacgcgagaaccatttgttagctcatttaagtgctgctttgctgattctaaattagcaaaagtctcatctcgtgcagcggttgcactgtctaaggtttcttggcttgcaagtttatctttaactaaggtttttgcacggcgaaaattagcttcgctttgtgtatatgcagcattggctgctgctactttggctgatgcggcagcaacttcttcgggacgagcaccattcaaagttttttcaagaaatgcagtggcttgagctagttgtgcttgtgctttggcgacaatcgcttgctgaagttcggcatcaaactttgcaatcacctgccctttttcgaccaactggcctgctgaaacgggtagttctatcagaatttcgttagtcgttgcaggatggatcacacgctcacgttcaagtgtacccagcgccactccctcatttgagtcagagcaagctgtaatgactaaagaaattagtatgagtacaacacgtttagctaacattttaatttccttatggttagctgatgagttgctaaatactataaagtattaaaatgatcagtaaaagtgatcaataggaattaaagttttagaaatatatgtagtctatatcgtaaagttatatggagaataaagagtatttatttgaaaaggattttttctacttgaaatgagattacaaaatataatcttgataactcgttaacttacttaacgtaagtggcgtccccaaggggattcgaacccctgttaccgccgtgaaagggcggtgtcctaggcctctagacgatggggacacaaaatgtgtcactaggacaactgaatagtttgactcgattcagacgagcttttaataacacaacacttatagtaagtggcgtccccaaggggattcgaacccctgttaccgccgtgaaagggcggtgtcctaggcctctagacgatggggacacaaaatgtgtcactaggacaactgaatagttaaactcgattcagacgagcttttaataacacaacacttatagtaagtggcgtccccaaggggattcgaacccctgttaccgccgtgaaagggcggtgtcctaggcctctagacgatggggacacaaaatgtgtcactaggacaactgaatagttagactcgattcaggcgagcttttaataatacaacacttatagtaagtggcgtccccaagagattcgtactcttgataacgtcgtgcatagattgcgcggtgttcaccgccccactacacataacctacttgaataagtggcgtccccaaggggattcgaacccctgttaccgccgtgaaagggcggtgtcctaggcctctagacgatggggacacaaaatgtgtcactaggacaactgaatagttaaactcgattcaggcgagctttaataacacaacacttgtagtaagtggcgtccccaaggggattcgaacccctgttaccgccgtgaaagggcggtgtcctaggcctctagacgatggggacacaaaatgtgtcactaggacaactgaatagttaaactcgattcaggcgagctttaataacacaacacttgtagtaagtggcgtccccaaggggattcgaacccctgttaccgccgtgaaagggcggtgtcctaggcctctagacgatggggacacaaaatgtgtcactaggacaaagtgatagttttactcatatcggagctaaggttacttaatcaacatgcaagtactcgagactagcatatataacttcttggcaattgctcacttacaaaagtaagtggcgtccccaaggggattcgaacccctgttaccgccgtgaaagggcggtgtcctaggcctctagacgatggggacgcagaaaactgcaaccctaggacaaacactatgcaaatttggtggagctatgcgggatcgaaccgcagacctcttcgctgccagcgaagcgctctcccagctgagctatagccccgactttgcatacacactaccaattaatattggctgtgtatcgctgagtgcggggcgcattctatgcagccccctaaataaagtcaacagttttttatctaactttatttaaatgatttaaatttcaacaagctgactaaatatcaatccgttacgcagacatttcgaacagtataatgaggaattgactaaattttacaattatcaatactgataccgagatttaagtatacattacgtgatattaaacattacaaaaggtatacatttatatgcaaatttaagttagctaaactatcggttaaatcccaacagagagccccccgccctctttggttttaaacacagcaaaattgccagctatttagttattcagttttaatattcaacataagttgtgttttaaaaaatgacaagcatcgttaaaacatcattgagttcagttaaattagaggaaaaagagtaacgatgacaacgccacagataagcttatgaatataaattgcatatttgttcgccaaaaaatgcttaaaagccatgtcattgtttataaaagctgcatctaacacatttttactcattcaagtgttgacacatttacaactctatctataatagcgccccacaacaacgcagcaatacgttgtttttagatatgggtcgttagctcagttgggagagcatcgcccttacaaggcgagggtcactggttcaagtccagtacgacccaccattattccctaatggtgttcatatctaaattcttaatgggtcgttagctcagttgggagagcatcgcccttacaaggcgagggtcactggttcaagtccagtacgacccaccattaagaaatattgcatgtaatatgggtcgttagctcagttgggagagcatcgcccttacaaggcgagggtcactggttcaagtccagtacgacccaccattaaataaactttgatggtgtttcatattacaaaaatctaaatgggtcgttagctcagttgggagagcatcgcccttacaaggcgagggtcactggttcaagtccagtacgacccaccattattcaattaatggtatttcatttagatttatcttcgcgggtcgttagctcagttgggagagcatcgcccttacaaggcgagggtcactggttcaagtccagtacgacccaccattattcaattaatggtatttcatttagatttatcttcgcgggtcgttagctcagttgggagagcatcgcccttacaaggcgagggtcactggttcaagtccagtacgacccaccatttactttttgaagcaaaaagctaaaaatggtagcgaagaaaaagattatatgggtcgttagctcagttgggagagcatcgcccttacaaggcgagggtcactggttcaagtccagtacgacccaccatttaatctaaaaacaaaatttatatgtgggtcgttagctcagttgggagagcatcgcccttacaaggcgagggtcactggttcaagtccagtacgacccaccacatataaacacttcattaaatactttttttaaatcttctttattttatctctaattttcaaaagcatcgccactctttacaaaacacaggctcgatgattcaggtccagtacgacccaccatgtactttttagagcaaagagcatcgcaactctttacaactaaaaggctcggtggttaagttcagtaaaaccaaccatttaatctgaaaaatttatatgtgggtcgttagctcagttgggagagcatcgcccttacaaggcgagggtcactggttcaagtccagtacgacccaccacatataaaacctctttattttatctctagttttcaaaagcatcgccactctttacaaaacacaggctcgatggttcaagtccagtacgacccaccacatataaacacttcataaatactttctttaaatcttctttattttatttctaattttcaaaagcatcgccactctttacaaaacacaggctcgatgattcaagtccagtacgaaccaccacatataaacattttctttaaaggcttccttatctacctttagatttcaaaagcatcgccactttctataaaacataggcaaatggtttaatttcccccactgttcaacaagcctaaatacctaaaagctgatctttcatacttctcgcattttcgacaaagaccttagccaaacttttaatagcagcaaaagctgtaatttgccttgtcagcagctagactgtttattatagtcactgttaatgtcactcggtcgcaagtctaatgcctgcaaagattttttcgaacgctaaaattttaatagtcgaagagcaaccacttgctcaaagctatatgaaacaatcattagaggggttggggtttcgtcagttacgttttgcagagcatgccaactcagcaaaagagcagtgccaaatagagcaatttgatctaattgtttgctcttttaatctgagtaagcaacaagatggctatcagctatatgaagagctgaaaatgaagcgcctgattaaaaactccactggctttatttttatttctgctgaaacaagtggctctcttgtacacagtgtcttagagctgcaacctgatgatttccttgttaaacctttcactatcaatgaattaaaaaatcgtatcgaaaaagtactgatgcgaaaaagtaatttacatcaagtatatcaacttattgatgacgagaacgattcaaaagcaataaaaaagatcgacgaattattacaaaacaaaagccacagttttagtgctattttacttagactgaaaggcgatgccctacttcgactaaaacgtaatgaagaagctaaaaccttttttaaatctgttcttgatattcaaaaattcacttgggcaaaggtaggcttagttgaagctttgattgcatgtaatgagcattcacttgcacagcgaatgttgaaaacgatgttacaacgcagtgaaactcgtttagttgctctggacctgctaagccgactagaaattaaacttaataagtatgatgaagctcaacaactaattagccaagctgttgatattgcaccacgtaacattaaccgtcaaaaagctttgagccatgtatccttacttaatcatgattatgaaaagaactatttaacacaaaaagatattgcgacttacgcaaaattttctattcatgatcatcctgatatttaccttaatgcggcgcgcgcaggtatcgattttgcgctaacgactgatcaaagcgatcagataaaccgaatatctaggcagactaatcaatatttaaatgatttaaaaaagcaatttcccaatagtaataatcaaactcaaattgatgtactaaatgctcgattacattacttaaaagatgaacaccaaaaagcaaaagcgcttatcaatcaacttgatgagagtgatacacaaattcgttctgttgatggtgccctcgacaaagccaaagcattccatgaattaggctttcatcaaaaagcgcaaaggctgtttaaccaaattattgaccattgcgaacgtcacccatctgtcagtgatcctgtttatttaagatatattcaacagcaacaaacagaacgtcgagatatcaagttaggccctaaagagcttaacaaccatgcagtaacccagtttaataaaggacaactcaatacagctcttgaagcctttacgcaagcatttagggttatgcccaaaaatgccagcatcgcacttaatttattacaatgtttgttcgatactaataatcaaggccaatcttttaatttatcacttgctagaaaatgctttactttacttgctagccaagagctcgaatatgagcaagcaatacgatttgaaaaaattaaagcacaagctgataagttaaatattaagttaacggagtaaccgaaagatggcaccgcgtttgtcaaaacttatcaagccttttattacagcagcgatttttttttacagtgccaacagttttgcttcctctacactgcattactggcaacaagcaaacatagattggcgcagtgaagccggaagtcatataaatattcttgcagacgaacaaccagcattcacagcgttaaagccttatattccattatttgaacaactaacggggatctcggttggctttcatgccttagaacaatcacaaatgcgagcgcgccgccatcaagatttgagtgaaggcttaggcttgtacgatgtattgcctatgggaattacttttttaggagaagcgcaaagccaaggttggatagagcctcttcagccctatttagataatcccaagataactgataaaacatggtatcagctagacgacattagtgatcgaagcttagcactatgtaagatcaatgatattttgtattcattgccctttgatttttcggcgccaatctatttttacagaaaagatctatttgagcggtttaaccttaaagtacctgatacttatgaagagctctacgctacaaagataaagttacaacgcgctattgatgcaacgccagatcttattggaatgcatgcatttgcggcgcgcacattgccaggtgcgggactaaacacctggacagttttgccagtaatgcgtgcatacggggcacaagttatcgatgagcaaaatatgtctgtgtttaatagcactgaaacagcgcagagtctaagagtgtaccgagatttagcgacagggtatggaaatcctgataatagccgcttgctgcacttttatgaaatccgccgcttatttaaacaaggtaagctggcatccgcatttttagcttcccatttttacaatgaaatagacacagctgaagagtctaatatttggaataaatgggaagcagcccctctgcccaaaggtcccatagcaagagaaacctccccttgggcatgggcgtttgctataaatagcaagtccaacaaaaaaactgcggcttggctttttattcaatgggcgacaagcgagcaaacgtcatcgctacttagtactggcggctcccctcccagaaaaaaagtgtggcacgaaaagttgtttaccttggtaaataaacccggttttaatactacaatgttgtgggtatttgatcatgccacagctgatcgcctacaagctggaatggtagagttccctgtcattggtgaaattatctcgcaagcatttagccaaatattctatggtgcagatataaaccagacaattaaaacaactgataaaaaaattaatgaaacaatgcacacattcaagtcaaggagtgaaaactagcaatgaggataagcattgcccacaaaattctgatgataatcggattcaccattaccctcattttaggggcgagtacctcattgcatgtgatggagttaaaagaacaaacacttctaaacatgagtgaaaaagcagatgctattgtgtcccctatgctgtcagagataaaaaagctaacgaaagataatagtgtcggtagttgggtgatgaaagttcaaggtatctccttaaaaaatattctaaagaataatacatttgatgatctcaaaactatttactttatcgatcaaaataactttattgctgcacaccctgataacagtaaggttgatactttagaaactaaccagcaaatcctgaagcaattgaaccctgcactaaacacaatcattccactggatgaacagtatgtagtttcggtccccattaatagttaccaaaacgaaaatattggctacgtgattgttagtttttcagatactgacttagctgcaaagacaaaagctatcatcagcaatgctgtttcattatttgcgatatacttactcacagcgctcatcattgcttacatcattattcgaagaatcattttgcagcccattgagcagctagtcgagttttcgcatgcagtgaccacaggtgatttaaattgccctataaatattaaaagccaagacgaaattggtactcttgcaagtggttttaaaatgatgcgtgctgcagttaggcaacaaatcaatagtatgcatgagcaacatagcttacttgaagaaaccgttgctaagcgcacccaagagtatcttgatgctaaagagcaagctgagcaatcgaatcaagctaagagccgctttttagctaatatgtcacatgaattaagaacaccactcaatgccgtattgggctttagccaattattacaagacagtgaaactgataaaaataagcgtcgttatctagaagctatttcaatatcgggtaactcattacttaacgtattgaacgatattcttgatttatcaaaagtggatgccggtaaaatgcaacttgatattgatcgagttgagatccctaccatgtgtcacgaactcaacatgatgttcttacaattaagcgctcagaaagatcttgagttacaagttactgcgcatcctgatctaacaacacctgtgctgctagacagtaataaacttcgtcaagtactaacaaacttaatcggtaatgctattaaattcacctcgcaaggtagtgtaaaagtgttttttgattttaaagcgcataatgacaatagccatattgatattaaagtacatgttaaagacacaggtaaaggcattcctagtgatcaacaagagctcatttttaatgattttgagcaagtacaagggcaacgtagctctgagtttggtggcacaggacttggcttagctatttcattgcgctttatcaagttaatgggtggagagttatcggtgatcagcgaaaaagatcgaggcagtgaatttattgtgtcgataccgaatgttgaattagccgaatctaaaaacgaagttgaacatcgtaattaccctgctatatcaagctatcattttaatccagcgcgcattttgattgttgatgatattccttacaaccgggaatatttagaatccttcttatcacgctggagctttacgatagatacagctattaatggtgaagatgctctaatgaaaattgagcaaaaccaacctgaccttatcataatggatttaaaaatgccggtaatgggtggattagaggcaagccagttaattcgcagtgatgatcgttttaaacatattccaataatcgcggtaacggcttcagcgataagggatgataaggtgcaatcaagtattttgactgactacattattagcaagccaatttaccgtgagcaccttatttttatcatcgcacagtatttagattaatcacgttttttcatcgctatggcattcatgcaatagcgcaaaccactaggcgctgggccatcaggaaatacatggcccaaatgcgcgtcacagacattgcaaatcgcttcaatacgctgcataccatggctagagtcagctacataagcaatgctttcaacactgctaggctgagtaaatgacggccaaccagtaccactgtcgaacttttcatcaccatcaaataataaattgtcgcaacagacgcaggcatattgaccaggttcaaatatcgtacatgaatcagagctatgcggacgctcagtcccttttaaacgagtaacatagaatgcatcttgttcgagctcagcttgccactcagatggtgacttttcgactcgacgcggaggtgttgggttaccgttatgggcaaactctaaaatatcttgccaagttaacatagtgctccctcaaggttgaatacaactattgcacagtacatcacaagcacagccaagagcaagtagcattaattcgcttgtaaacggatatctatttgcgcacgttcgcgctcagaaagcagttgcgataaatggctattaattttgtcactattaacactcaatactgctgtgcttttttgtccgttgacgtcagtaatatggataataccttcacccacttcaatctgcttaatttgaccaattaacacaaactcagccttgcgtttaaaatcaaacagcccagaaaggctaatgagtgctagctgattaacatcgcgttttaataagtcagtaatggggttacgcgctacaaatagcggcgtcactcgataaatgcttgatagtgttataaagccccataacatcacaaacaatgaaaatgcagcactgtgccaaagtggcgtaaatacccatatagcgattaatacgaatgcgatagtaaatgagatttttgctaaaagcttattaattgccaacatattgctgccctatttttttgttattggatctggccaatcattgaaaaagacagacaagtatctgctttttaataaatataacagtacccataacaccagtaccatttggcaagctaagaacaacgaaaactgatagtggctgtgtgcagcctgataggttaaccaacttaaatctgtgattgcacatagaattaatggccagcgcatataacgccaaatcgacgcaaaacgttttgcactatctgggttttcttgtggtcggcgcaagcaaaagatcaccgcaggtaataaagcaatcgcagcaatggcaatagcgataaaaaaatcagctttagatttaaagaacaacgacatgatatctagatcagggcgacgactcagcgccgccatcagccaaataaaataactacgcaaaagcacaagtaaggttaagtggaacgccacaggcgtccggtaagtgccgtgtttatcccagtattctgggccgtagcgattcatatttggttcttcttatcagcaatgatgccaagtaccaaaaaggctgctgtaagtgtaagcgccagccatttaacaccgagtagcattagcaatttacttaaaaaaggagtcacaaacaccacaagtaagcccataccaaaccctgtgaccagcacaaagcaaagcacacgaataataaagtgacgacgcgccacaaagcgcttggtcactttaataatgtcgtttgcatacaaggatataaaacacaccaccagcaataatgaaatattgtaaaggtgtggttgtagccaactgccgattgttaaagcaactgacgacaatgcctgcaataaactatccattgtgctcacttaaaagcgcaatgaggtctgcctctgttaatacatcaatgcctaaatcttgtgctttggttaattttgagcccgctttttcgcccgcgatcagtgcatctgttttcgccgaaacactgcccgacactttcgcacctaacgcttgtaaacgcgcttttgcatcattacggttaagctcgctcaatgtgccggttagtacgtaggttaaacccgataatggctgtgcatcggcacttggggctgttagcgcgggccagttaataccctgctcaattagcgcgttaaccacgtccatattatgctcttcagtaaaaaagccacgaacgtgcttggcaacaatttcacctacgtcgcttacttcagttaacgcatcaacacttgcttgggtgattttttctagggttaaaaaatggtttgctaggttttgcgctgttgcttcaccaacctcgcgaatacctaacgaatataagaatttagctaatgttgtttgcttagcttcttgtagcgcgttaactaagttcttagcagacttagggcccattcgctcaagtgattcaaaatgaccttgtttaagggtaaataaatcagcaggtgttttgataagctcacggtcaacaagctgatcaacaatcttgtcgcctagcccatcaatatcaagcgctttacgtgacgcaaagtgcttaatggcttgcttacgctgcgcttggcaaactaagccacctgtacaacgggcaaccgcttcaccttcaatgcgttccacatgtgactcacaaattgggcaagtagcagggaaaacaatatctttggcgtcttcaggacggcgctcaagcacaacttgggtaatttgcgggataacatcacctgcacggcgaataattactgtatcgccaattttaacgcctaaacgggcaatttcatcgccgttatgaagcgttgcgtttgacacggtcacgcctcccacaaataccggctctaaacgtgcaacaggcgtaattgcgccagtacggcctacctgaaactcaacatcaagtaattgtgtgatttcttcttgtgcaggaaatttaaaggcaatagcccagcgcggcgcacgtgccacaaagcctaaacgctcttgcagctttttgtcgtttattttaattaccacaccgtcaatttcgtaagccagctcactacgacgtgctaaaatgtcttggtaataatcaagtgcagcttgctgtccttcaaccagtttagtttctgggcaaagtggtaaaccccaatctgtcagtttagcaagctgttggtaatgatcttctggtaactgaccatccgcaacaagccctgtactgtacgcgtaaaacatcagcgggcgttttgctgttactttagaatcaagctggcgtaagctacctgcagcagcattgcgcgggtttacaaatactttctcgccacgtttttcggcttcactattaagcttggcaaacccggcactatccataaatacttcaccgcgcacttcaagctctgccgggaagtcattgccacgtaacttaagcggcacattacgtattgttttcacgttttgggtgatgttttcacccaccatgccatcaccacgggtagctgcttgcactaacacaccgtcacggtaaataatcgatactgcaagaccatcaagctttggctcacaacaaaaagttaactcactgctgttcattaaacgttctttaatacggcgattaaaggcagcaaactcctcttcagaaaacgcattatcaagtgacagcataggtacttggtgagtgacttgctcaaacttatcaagtgcagcaccaccaactttttgtgatggcgagtcagggctttggaactctggattagcttgctcaagagcgcttaattcacgcattaaacggtcatattcagcatcaggaatgcttggtgcatccagcacataataattatggttatgctcttctaactgggctcgaagttggctaatttgctcaaagatagggctggacatgaaaacctcaaaaatctacataaaaaagccacttagacgacttaacgccaagtggcctaaaacttattatctgtgcgtgcgattaagctgagaagctgcgaactttctcaacatattcacgtacgctttcaaccgtcatctcttcacggttgctatctaaaatagtcgcaccaaattcatcagctagctttttagctgcactgtgcaacatattaaatgcacttaaaccgtcaccatcacatggtaaggtcataaataaactgatacccgctgtactaaactgctccatgttatcgatatcaaacgtacctgggttatacatattcactaaacgaaataacaccggacctgtaccagcagggtctaaatggcggttaaagaagccctcttcagaatacttaaagcctaacatattaacggctggcaatagctggctgccattcataactgcatcttcaggcatctgcaaatgcacaataatgaagtcagttggagcttgtgcttcttgctcttcgtcagtttcagtctgctctgcttcaggtgattctgaaatctcatctgaaacaacgggttcatcattatgttgcgcggaaaagcttaaatctccaaactcaggctcgtcacgttcttgcgactgaactggagcaggctctgatatctcagaagttgtttcattcggttcgacccgttcttgcgctggcgcatctggactgtcctttttacgcaccgaccataagccgtgaattaataaaccaccaatgacaaatacactgattacgattaaagcccatcttaattcttcggccatcccctcacctttattatttgatatgcctaactaaatttatgcatgtgccatttgcacagcttgttctatatctacagcaaccattcgtgaaacacccggttcagccatagttacaccggtcaatctgcctgccatttccatggcaatcttgttatgactgatataaataaattgtactgattgtgacatctcttctaccaaacggcaaaaacgacccacgtttgcatcatccaatggcgcatccacttcatctagcatacagaatggagctggattgagcctgaatattgaaaacactaatgataatgcggtcagcgctttttctccaccactaagcaggtgaattgtcgaatttttcttgcctggtggccttgccatgatgcttaccccactttcgagtagatcatcactggtcaattcaaggtaggcactaccaccgccaaacactttcgggaataattccccaaagtctgtatttacttgttcaaacgtggccttaaaacgattttttgtttctcggtcaattttttgaatcgccccttcaagggtatttaacgcttgtgttaaatcatcaagctgctgatttaaataatcactacgctgcttggcctgctcaaattcatcaattgctgctaagtttactgcgccaagctcatttaaagcttgggtggttttagtcaaaatagcttgcatactatttaaattggcactgtcagacagttcttcaagtactgtttttaaattttgttccagttcttcaagtggctctaaagcggcttgtgctttaacgattaaactttgctcatccagtgccaatgcttgcaactgctcttgtaacgtaaccaactcagattgcgacgatttcagcgctgtttgcttatcagcaagctcctttttagcttgactcaaggccgcttgcaagtttttcagctcaacgtcactttgttgatgcttttcaagcaatagcatgatttgctctgccacctcttcaagcgggatcactaactcttctagttgctcattaagttctaacacagcctcacttgcagcactttgggcggcattggcgtgttgcaatttggtttcgctaagttgacactcactgcgagctttttgctcagccaaatttgcttggtgagcctgcgttttatattgctctagctgagacgcaacttggcgatagttgttatttgcctcagtttgtcgttgtttagcctgctcgagttctgtttccagcgttaattgctgttctagcaattgctcaagtaaactctgctgggcttgttgctgctcatcggcattttgcttttgctcagccagtaaggtttcacgctgttgtaacttaacaagctggttttgccactgcgtttgctgctcaagcaacatatcgcgtcgagtgctagccgatgcaatctgctgagccgcttggtgaattcgctctctgtgttgctctttgtcaacgatgagcgttttcttatatgccagatgctcgtttagcaattgttgcttggtttctaattgctcgttgagctcttcatctaactgctgtgcatcgctaagctgagcatgctttaaaagcaaagaattgtcggcgtctttattggcatcggtgtgaaagttacgaccatgaatacagccttcttcatcaatcactgccagccaatatggatccgccaaaatagcgtcattaaaacaaggttgaaatgcaaaccgtgctaataaatcagggtatatacccgactcgatataattagctaatgactcttttggcacagccgcacactcatttgcagcccaaacactgttagcctctttatgttgactgacctttagatgctcaaggccaagtagggcttgttcaactaacggctcaaagccaggtgtcacttttagctgcgctaataaagagacactcccgctatcagcttgctctgataacaaggaattaagcgctgcaatactggctttgttttcattactatgctgttgaacccgtctaaaattttgctctaaatgctgttgctctttatcagcttgttctagattctgagtgagcttattaagcgcactttgctgctgagcaagctctttagtcagtgtttgaatatgctgttgttgctcagcaatttgcgctgcaacaggagttgcttcaagctcactaatttcagcggcaagttgtgcctgctgagattcaagttgcgcaagagtctgtgcaaagtgagcctgttgactctttgcaacggtaatatcactagcatgagtttgatttttttgtaaggtgctttggtattgctcatcagcactttgtttatactgatgttgttcagcaacttgttgctctacctctgcaacttgctcagcgcacagtaaactttgctcaatcgcttcttgtagcagctcttgtaacattacagccgatgcatgttgctcttcttgcagctctttgttttgtaactgcagttgttgctgtttgataaggttttggctaagtgtttgttgttgctgctttaggctaatctgttgctgctctttgcgcgttaactcagtgtgtgtttgatgctgagcctgctgagcatcttgcaatttttgctgctctagttgcacctgattttcaagacttgctaacacatcatcatggccagaatgcgcttctttaaagaattgaatttgctctttaagtttattgatttgctcggctttatcgatttgttgttggtgtagcttctgccactttaagaccgcaatttgtccttttaaggtgcgctcagtggcttttaactctcgatacttttttgcatcgactgattgcactgcaagcttatcgagctgtgtttgtaactcttgccttacatcgagcaaacgttcaaggttttcgcgggtgcttttaatgcgggtttgcgtttcacgacgacgctctttgtattttgaaacgccagctgcttcttctaaaaaaacacgtaaatcagccggtttgctctcaattaaacgcgagatcatgccctgctctataatcgcatagctgcgcgggccaagacctgttcctaagaagatatcggtaatatcgcgcttacggcatttactaccatttagaaaataaattgactgaccatcacgggtcactaagcgcttaatcgccacttggtttcgatcagcaaaggtattcggaagatggccactggtgttatcaaacaccaactcaacagaggcttgcgaaataggttttcgattagttgagccgttaaaaataacatcggtcatggcatcgccacgtaaatttttagctgagctttcacctagcacccaacgcactgcatcgatgacatttgatttgccacagccgttcgggccgacaacacacgtcatctgatcaggaaatgggatcttagtgggttcaacaaacgatttgaaacccgctaattttatggtgcttaagcgcatctaattgttttaccgatttttattgttattcttcaatttaacccattttagggtaaaaggttaagcgtggcgcttaaaattatctaaaataatacccgttgccatggctacattaagcgattctgcttggccataagccggaatagtgattttatcagtaactaagctttcgcaatcagcacgtataccatgagattcactgcccataagtaatacggcatcttgcttaagagcagttttgtgaatgttctcaccttctaaaaatgcaccatacacaggaagatttaagctaggtaagtaactggttaagtcggtttgtgagacacacacgcgagcaaatgagcccatggttgcgctgatggttttcgggttataagcatccgcactgtctgtgctggtaacaatatgcttaataccataccaatctgcaacacgaataatggtacctaaattacccggatccgacacaccatcaagggctaaaataagtcctgatgttggtaatgcttgctgacttggcatatcaacaactgcaattgcggcgttgttactcaccagcgtgctggctttggtaaggctgtcttcatctgcttcaatgacttgatgggctgcaagcgctgtttgatgcgcagaaataaatgcaggagtcgcaaatatatgagcaatacttaaaccactgtttagtaattcaagtacatttttttcgccttgaacaaggtactggttatattgctttcggtacttcttttgacctaatgcacgaattagtttcagttggttttttgaaatcataacagcctcataaaatgattctgtattttatacccaaaccacctcaagatgcgagtttcagttggaattaaaagcgatttaggcaaggcattgattgcaagtaatagtggttctattgttaaaatcaataacgcagtataaatcgcttttaaaccaaccctttgggcgtttcacaggcacttactctcatcgttgttacttcttaaaagggaatgccattcttgcaaagtaacgccttgatattaagcacctgtgaaacgctgaattctgcatcttgaggtggcttgggtataatagattctgtactcgaaaaaccaaggggaaagtgccaattgcttattcaatcagcacttttaagagacactagctaataagagtcattaactaattttcgtcagccattcatttaaccatggctcagtaacaggccaaggctcaaaatcttcgcaggcatcaatttctaaacgatgaccgacaggttttgcctgtaaatcgcgaaatagctcatcaaagctgcgacctgcaccacaaaacgtatcgccataactgcggtcgcccatagcaataatgccgtattgcttgcctgttaacatagggaattgatcgtttaattggctatataaagcgactaagttatcaggaatatcaccctgacccgttgttgatgtgatcaccaaaatatgtgacgcagccagcatgtcatcaaccgtgccattttcaactaattgcgcttgatgctctgacttttcaataacttcaataacttgttcacttaaacgctcagcaccgccgtagacactgccgacaaaaatactaatggttgccataataatccttttcttctgttggccagccaagttgctggcaaatcgttaacattgcatcgcctaatggcgctctaattgttattggttgcttgctataagggtgcacaaactttaattcagaggcaaataacattaagcgacgaagctgaaaatgctctctaaaaaattgattatgctgattatcaccgtgatttacatcaccaataataggcaatgataaatgttttaaatgacgacgaatttgatgtttgcgaccagtttttggaaaacactccaccagcgagtaacgaactgttgggtatttaccaattggaataggcaggcttgcttggtgcaggcaatgaaattgcgtttgtgcttcttgcggtgctttatcttgatcagcaaacttatcggcaattttatcaagctcttcttttaaaggtttatctaagaagattgattcgtttaaaaagcctctaactaaggctaaataacgcttttcaatttgcccatcaataaatatctggttcatgtcacgggctgcttctgagcttaacgcaaacagtaatacgcctgacgttggtctatctaaacgatgtacaggaaacacgtgttgaccaatttggtcacgcagcatttgcattgcaaattgggtttcgtgtttatctaagaacgaacggtgaaccaataaacctgatggtttatcaatcgcgatgtaattttcatcgcggtacagaatcgttaactcgtcaaattgtggcttaacaatctcttgcatgttagttatcacttaaaagttgatcgagtttttgtaaaacggcaatcacatcatttccgccactatgttgtgccagcatcatttcagccataggcgcaactgcaaaattacggggtaaaggctgggcatgtgcaatgagggtatgcattttttcaagaaaaacaaattgcagccattgctcaaatgccatggtgtcatgacaaaacggcacactagaattgagtgcacttgggtcaatcggtgttgtttgccatagtgaatggcgttgtaatgtggattctaattcgcgcagcagcgccaaagtctgttgatgcattgtaaaactcttaatacctttttacttagggaaggtaaacagaccctagtataccctgttccaaggcgccatggtatggcgtataattcgcggctgatatagattaataacggtaattgagattttatgactgagcagatcgccacactagggcaacttctggatgcagcaggtaccacttggcgtgccttcgatattggcagacacatcacgaaattagacaaaaaacaatttcttgccattgaagaaacaaaaatcccttacccatacccgcttgctggtcatgcttggcttgctattcaattttgggatgtaaaagcgtctaaagaaccttatgtatggtttttaaaattcccacttgatgagcaaagccgtcttgttagcgcaagccgcgaccatttcgctaatatggttattgaagcacttggtacagaaattaccgacgaaaatgccgaaggcaaacttgataacaacccgtatgtatttacgccaaacgctaacaagctagcagcatttaatgcgcaggttaaatgtttacttaagcaaagtgcttcacagtattacgaatatgctcagctgtatttttcaggcaaactgggttttgataattggcaaagtgttgcagtacaaggtattgctgactttgcgatgcgtttagataacgacaccaatttagcaaatctacaagccgcatgggggcaattaccagtcgaagtattacagccgctgagtgcaatgcttgaacatgtagcaatcgaacccgtgtttgcagagcaattgttagcttatggtttaaatgcgatagagcaaaaagacgacatcgcccttgttgcagctcttagaagcttatcaaaaacaccagcgcaaggtttaactgcgcaactggttgatgctgtattgcgctctgatatgaacacccagtcagatgtactattaacgattgcagggcgttgttttagcacccttgaagacccagaacgcttacatgtgtttatggattgctgtgcgcaccatactgagattgaacaactgtttgtgagtattttcaccgatttagttgcaattcctagtattcgccctcacctactaggtttattaagaaaagaaaatcgtagcgaaacactcgctcgcgcaattggaaggttattctcgtaaatggcaggcttgtggacactcatcatcattggcagcatcatctactttttttggttaaacagaaaagtagccgaagcagctaaccttcatgcacaaagacaaattgagcaattgaatgtgcaattgatgagtgttgcttgcaataaacgcagagtgggtattttaaaaagcggtaaacctggtattaaaagcgagtttatttttgagttttcaagtgatgggcaaagcgtgtatcaaggcgttttgatcatggaaaatgaattacttaaaagcgtagtaataccgccgcacaaaatttaagttgcgagttgcgagttgcgagttgcgagttgcgagttgcgagttgcgagttgcgagttttacaaagtaattgttggtgcgagaagtacaacccccagaaagaactaaggcgtagctattagccacgccccaatcttgctacttccatgattaagtatccgtacttatgccgaagctgcctttttatctatcccctgaacgggtatacatccgatacacccaccatgctacatcttgtaacatttaacacatcctagtgccgtcctcttgccatcaatggctatccacttcgttttccaaacgctcctttagcttcctgctaaatcatcctttggtcagtccttttcaatcgctccgcgatcgtactgcatcctggcagtgtccttgttcttccttgcttccctagcacttgtccctttgcttcctgctaagcatcttgctttgttgccataatcctaatccttggcatcagttcaatcattgaacctgtgtcttcttgacatgattaagtttagagaaaagaggaaatcttgataggcataaaaatgaattttttcttagtcacaaaaatgcaaaaaataataaatcgtttaaaatcattagaataagcttttttgggtacagatttaaaggcattaaactgacaaagcgcacagcaatgtgagacttatctcacattgctatttccaaaacgtcctttcgtcaatttactgctttaaacattaagtctccttcgacttggttaaagcttagggctttgaatacctcaaacccttcagaactaaagaattcgcgctgctcagggcgagtaacaaatactgctaaaccacttgtttgactgcttgactcaactaaatcatcaagacctcgtagcagatatctgccgaaaccttgcccctgaaaatgtggatcaacggcaatgaaggctaaaaataaataatggcccttgctcgaaagcgcttcacggatagttcgctctttttctataagctgattagtctgcaaaaaacccgcactgagcattaattttaagcgccaatgccaatatcgttcagcttgtagttcacttgcagaatcaaatacacaggcaatcgcctttaatctactttgcgagtaaaggcctattaatggctgtttttcttgccagaaacttgctagctcttcacgtaccaaagcacgtaatttagtttcatatttacttgggttatcttgttgaaaacctagtacattctgaagaacagggtcgtcatgataggcttgataaataaggcttgcggcagtgctgatgtcttcagcactaaggtattgcacacttatggtttcgggttcagcaactgtcaaaatactcatccttttatttgttttattattttcgtactagactataaggtatatacctaacagcgattaaagacaaattcagcgtaagttaaactgcggttcatcatcattaagttcaagcagtaataaatatcgccatacacaaggagcagaactatggatacgacaaaacatgacatttcgaccttatttgcacaacttggtttaccgagcaaagaaagtgaaatagatgctttcatagcatcgcatcaactgtcagataccaccctcttacaggatgctccattctgggatgaatctcagcagcattttttagctgaatcgctagctgaagatggggcttggagtgaggtgattgatgaattagacgcgcgactgcgccaataaaaacatgaatgcttatttgtggcctaaattgcatctgcttttcggccacaaataaggaaagtaatttcacaacacctctattattgctaccatacgcgcgcatcgcagccatacactgtgatgttttttatgcttgctcgtttatttcattatgtaattttacgagttggtattagtctttattaaagagtttatacaaaaatgaatgccgttgtatttgatgcaattaaaacccttcttgacgaaggtaaaaccccaacagttgccttaaccaaaagtaagctaacacaacctatgccgatgcctgtgatcatcgccgcggttagccaatataaaaacaatccggattcaattaataacttcatcaataacccgtcaaatgaacaactgagtacaccaaaagaaagtcaattggaccgtattgaagctaaattagacaggttattagcactgcttgagaaaaaataatgtttgttgtcgatctgacttttgattgctaccaagatactaccctagagcttgctgagcaggcaataaaccgcctagttaatgcacttcgttttaacggccaaatcattggtgatgaatttccaacggttttaaaagatggatttttcattacccgtgtgatgtgcccgaccgaagatgcgatgcatccgctcaatcatagtccgtttgtaaagcacagtattgagcgattacacaccgcgggcttacttgcaccaaaagttaaagtggtcggccaagatattcactcaaatggcgctgacatgtgtcatgatccgtcgtgctatattttatacactacgtatgtgcatacctgtagcccgctctattgtggtgatgactttttacctgtgccgttatttcgcattccggccattgccaatggcgattataaaacactaataaaatggcaagaagactggcaagcatgtgatcaaattcagatcaatggtgcaacccgttgtgaatttcctgcgcttgaagagctaactagcatcaatagtgacttatatcgccggggtcgcgatatcactaagcgtattagttttctaaccaagaagccggtttattactatttataccgtgttggtggcgttgataaagagtcagagcttaaacgtcgctgcccaagttgcgatggcgagtggaaattacctgagccatggtttggcttatttgattttcgttgtgagccttgtgggattgtttcgaatatctcgtgggactttcaataaccaaatataggcaataacaagatacacgaaaggggcaatcgcccctttttacttattaagttcataccgttactttatctaaaaactcactgatgctatttgctaatacatgatgcggttttttacccacgtactctaaacaaacctcaccgctttcgactaatacagtaataagcagatcatcttgctctgttaggcctataaacacggtttctggctgctttagcttacgcttcatcagtacgtgacccgtaatattttgctgtaagcggctaaaatcatcttcattccatgcttgtagcaattcaatgtgatgatcatcaacattcaataacaagttacccgcataaagatgaccaaataaggggtttaagtcttcaggaaaagataactcgagcgccttggcgaggtcatctaaactgccggcaggttgttgtgggactggacaccactgaataagcccctgctcatcaacttcgccctgctcacacggacttggccatgctgtatcatgttcaataacaggaagttttcctgtgcgttctaggcatttttcactaaatgcttgatgtaacttatctagttttatagaaacagacatactgcgaaactcattggctttaggtataatgccaacattgtaactacaaaagtgtaaagatgacagattacagcaactcacccgaactaaaagacagtgttcttggtaaaagcacagaatatgttgatacctatacgccaagtttgttgtttcctattgcccgcaaactaaaccgtgatgctttaggtgttagcgaagataacttaccgtttaaaggccaagatatttggactggctatgaattatcgtggctaaatagcaagggtaagccaatggtcgctgtggcaacatttgtatttccttgtcagagcagccatatcattgaatctaagtcattcaaactgtacctaaatagttttaatcagacacgttttgagacgctagatggcgtacatcaagcgctttgcaaagacttatccgctgcggtaaatgcaaaggtgatcgttactttataccaagcagatgatttcaattgtttgccattttcagcgttaccgggcgaatgtattgatgatctggatatcgaaatcaccagctatgatattgatgcaagctcacttcgccataatggtgatgaggttgtctcagaaaccttacacagccatttactaaaatcgaactgtttgatcacttcacagcctgattgggcgagtgtgattattcgttataaaggccaagctatttgccatgaagccttattaaaatatttaatttcgttccgtactcataacgaatttcatgagcaatgtgtagagcgtatctactgcgatttaatgcagcagttaaacctcgaagagttagaagtgtatgcgcgttatacacgccgtggcggtttagatatcaacccttatcgctcaactaatcaagatgaaactcccttcaaggtgaaaattaatcgccaataacgttggtgacaataaaaaaccgagttcaactcggttttttattgtctgaagattcattactcgtctttaaaaatccccacatacgttggtgatgtatttgatttactcgcacgatacataccagcggtgttaaacggcaagctgatgttccctttagcatcaatgatgatcacaccgcctgtgccacctataggcattaatacatcgtggatcacttcgttacccgcttcaacaatggttttaccttggtattttacgcgagcacaaatatcagctgccacattgtagcgaataaaatactcaccatgccctgtcgcagatactgcacatgattcattttcagcaaacgtacctgcaccaatcacgggtgaatcgcccacacggccaaagcgttttgcagtcataccacctgttgaagtacctgcagcaatattgccgtttttatcaagtgcaactgcaccaacggtgcccattttgtaattaacaggcagggctttatgtgctgcttgatagtctttgctagttactttttgtttatcgagtttttctttggcttttaataatgccttgtagcgatgatctgtatcgaatagattgttttcaaccagcggcataccttgggtttttgcaaactcttcggcaccttgaccgctgagcatgacatgcactgatttttccatcactaggcgtgccagattaatagggttttcaatatgtttaacccctgctacagcacctgcttgacgtgtacggccatccataattgatgcgtcaagctcatgagcaccatcataagtatacacagcaccgcgacctgcgttgaaatacggtgagttctcaagcacattaattgccgcagtgatggcatctaagctatcgccgcccttttcgagtaccgcatagccggtttcaactgcttcttttagtttttcacgataggctttttcttgttctggtgtgaagcgactcttttctatggtgcctgcaccaccatgaatagcgatagcaaaaggttgatcactactgtggcttagggtactaaatgataatgcgctaagcgcaatggctgaggtaagtaatgtttttagcataagggcacttatatttattttagtttgtaagcccaatgtgaataattcagcgctgtatttcaagctttaaccgatgaaagaaacaaaaaaagcgcctaatggcgctttttttcagcagtttaaaattaagcttgcgctgcttttaaacgtgctaaacgagctacttggtgagtagacgttaagaaagagtagataggtgctaggtagccacgtttacgaagttctaagaattcttcatcgcttagtgagttaagttttttctcatcaacaaggtagataccgttgatgtcttttttctcacctttaatttctactgttagcgtttgtgctactaataattctttgtctgctaagaatttagtaaatgcttctgttacttgcgaaaactcaatgtaagaaacaagtgcttctttacgacgcttaagataatcggtctcttcaccgttttcgaaaagtgcgttacccgcttcttcacttactaatgggcttgcttcgtcaattacgataccaaattgatcagcttctgggtgcttaacaagaccaagtggataacgagtcattgccattggagcaaatgccgcagtccatttgccatcttggatgaaaaggttttcgcctggctctagaccaaataacgcaactgcttggaattgacctgattcgttgtttttaacaaatgccattgggaattcatttgcgatgcgtgcaaattcgtgtgcaaccacaggtactaagtgctgagttttcataaactcgatattgatgccattttggattttagtgttggcatgtttttcgttatgtaaaggctgtacttgttgctccgccatgatactgctccattaattttataatatgtttttgctgttagtgcccaaagcctataggttttggcaacaaaaaggaagtgaaaattttgtggcagtttgtacattatagattaacaaaattgcccaccttatcaatcaatcccaaatgatgaaaaaacaaactataaacaagtaaatattatcacgcataagccactatttttgttagtatattcaacaattatggaaataatgaggcaaacaatggaaggctatcatttaaataaagactataaaataagcagcgttttcattgctgaaattaatgagactgtcattattattgatgactttttacacagccttgagcctatttatcaatttgctacaaaaacagcttatttccagcctttcggtagtgatggaacgctctaccccggtaagcgtgatgaaatgccagcgccttactatcgtgcttttgagcagttaattaatgagcttttagagcaaaggataattacaagcggtgaaaataatttatatcttcaccgctgcaagctttcattagttacacaaaatgcggacgaactaaataccttacagcgtatgccacatattgactcgacggacgataaaacatttgcagcagtgcattatttatctgctaaagaatggggtggtacgggcatttacaaataccgccctgacaacatcattaaagtgacagctgataatcaaaatagcgtacataaaatgattgctgatactgaaaagcacagcgcaactcatcaggggtatttaaatgaaacaacagagctctttgaaaaagtggtgaatattgaagcaaaggtaaataggttagtaatttataagagcaatctactgcatagcgcagctctttttaataacaaaaagtacaacaatgatattaacaacagccgtttatctatctcttcattttttagaattaactgaactggctaatggtttttagccagctcagttaatgaaaactagtttttctgtaagccaaatttctttattttatctagcagctctctgtgcttaggtagctcatttaataactgcttgacgcgttgctgcttaaattcagcaacgtgttgattgtcgttctgcttagattgctgcttggctggtacataatgcataccaaacagtacgtataagtagttttctaagtcgaataaatcgaacttactggcaaagtcttctcgtaccggtgtaaagcgctgccaacgtgctaggttattttttagtttttctgatagctgctcggttttcttgttatcacgccaaaaggccgaatcggttctatccgaaatacagtaatgcatctttataaaatcaaaggtttgctgccatacataattcacgtgctgattgtaatcatcagcaactaatttaatgtcatcgcggctgcgcggaaaacgtttagctaataaccctgcagaaaagtccgcaattaaaatggctgtggcttcgagtggctcaacaaagccttgcgataaccctatagcaacacagtttttgtgccacattttttctctatgccctactttcatcgggatttttcttggcgttaaatgctcaaatttattacctaagtaacgatgtaatttttcgtgagcttgctcatcgctcatatacttagatgaataaacaaaccccactcctcttcgctctgtaagcgcaatatcccagatccagccagcttggtgtgctgtggcgatagtataaggcggtatttcatcatcactttgtgtaggcacttgcaaggtgattgcggtgtcggttaataagctatctgatttatcgacaaaaccgatccctagtttttgcccgataaaggcagccgaaaaaccagaacaatcaataataaagtcaaactctaaggcgttaccttctgagtcaattagatgtgtaataaagccttgctgatcacaggttatatctttaatttcagcaaaaaggtgttttacggaaaaatgttgcgtggcatgacttcctaagaatgaagcaaactttttagcgtcaaaatgataagcataaccgttgataccggcatattgcggtgttgcgattgtttttggcgctagatttttttcacagcacacatgctgcttagaaacaaattcagcgtagtcattgccgttaccgtcagcaagccactgctgcgttaattgctcaccaaaaatatgtggatgatcaaataaatgatggtaaaagttagcaccatgtttgtgtttatctagccaatttacaaacttgattgactgcttaaaagtaacatcacattcattgataaagtcactttcactgataccaaacttttgcaatgagttgcgcatcgaaggaacagttccttcaccgacacctatgctggcaatatttggtgactcgattaacgtgatctcaatgccactatgtaaaagcgcatgccccaaatggttagcagctaaccaacctgctgttccgccaccaacaattgcgattttttttatcatttttactcgcccactttttataccaattcgcttaattaaatggtctattttgaggcaataaaacctcgttgataacaaggcaaaaatttcgttatttagttgtgctcggcaattgctcctgcattgctctaccttctgcatccatgcagtcgtaaatcagaaatttttaacgcaggtagcgacaggtttaatccctcaaaatgactaagtattattgcggattggtatcactcacaaaaaagcccagtacaagctgggctttcttaatttcgttatctaaatcaaattagaaacgtagtgatacacctagcttgtagcgtgcttcaccttcaaagctccatgctggatagccgttacgaagctctggtttaacctcagcatcacctgtagcagtaccaatttggatactatcttcttcagtgatattaaccgcttcaaatgttaagtctaggtagtcagttacagcaaacttagctgttagatcgagcgtaccatagtcttgatgctcgcggttaccatagaagtaaggtgcttcacgaaccatatactctgagcgccagttatacgctaaacgtacgctatagaaatctgcttcatagtaaccaactaagttaaccgtatgctctgaagagtcagagaataattcgatgcggtcagggaagttctctgcaggcgcttctgaatcaacccaagtatagtttgcttgataaccaaagccattatcaaaaccatcttgaatttgcagctcgataccttgaatttcaccacctgaaccagttcctttagtagcaactgtccagttatcaacacctgaatctgggtctacaatgcctatgctttgattcagaatttggtcaactttagtaaatgaagaaatatccttgataaagtaagccgcacttatcatgccgtcgccatcaaagtaatattcaataccgaaatcagcttgtgttgccttaaacggttcaagaccgatattacctgtagtaattacctcattaccaattgtgccatcttcgtaaccagacaacgaagatgctgcaaacatatccgcataattagcacgagagataacttgtgcagcagagaagcgcagaatcatatcttcagttaggtcaaacgcaacgttaacacttggtaatacttcactgtagtctgctttttcagtgctaaggccgttaccatagtcaccattagcatttaatgcataataatcagactctgcatctgtagaaacatatcttaggccaaagttaccgcgaataccttctgctgaaaaatcagccattgcgtataacgagatattttcttcttgaatcgtaccgtagccagatttataagcaatagatgtattatcgaagctggtaatagcagcgtaaccatcactaatcatttgatcaagctttggctctggtaatgtatagcctgcaccagaagaaaccgtacctgagtaataacgagatgcatcgtatgcagcgattgagtcaactaagtttgcagtataagtttcttgcttaacttcatgatcagcccaacggaaacctgttttaatagctgtaattgcgccaaaatctacagggatagttaaatcaaactgtgcataagtctcttcgtccgtattcggctgtttcttaagagcccaacctgctgaagataattgtccttggaagtcatctggcgtgaatgatttatttgcaacattaatatcaataacatcgcctgtcgcatcataggtgccggcatagtctgctggagtgcctaaccagaaaccatagtttgctgttaaatctgtaccaccttcagattgggtattaccaactcgacctttaagttcgaagttttcacctgaatacttaaagtcgaagtcaaaagtatctgaagtcattgaacctgcacgagcccaagtttgtgcccaacctggatttgcgccatcacctgaacggcgatagaaagtacatgttccatcaacattaacttgctcacaagctgcatctttgtcatcagggaacataacaaataatgacgtgttagcattatcagctgataagtctaaagtcattatgttaagacctaactctagttcatcagtcgggcggtattggaacactgcgttaatagctgtacgttcacgttgttgttggaatgttgaaggaacaatgtcaccccaacctactaaagactcaataccattgcgttgataatttgtttcagaaaatgctgctgatacaagcgcaccaaacgtttcttcatcatttttccagctataaagaccagagatttcaggatctgtttcttctgagatcgtaccgtagtcagcttttacacttccaaaaagagtattagagtcaagatctaaaggtttgcgagtgtttacgattaccgtaccaccgataccaccttcaacgagattcgcttgagatgacttataaacttcaataccaccgaccatttcaggtggaagtaatgtgtagttaaagcttctatcgatagactgttgatcataccaccctgttgaagcaactgagtgtccatttagtaaagtacgcgttaattgtgcagatgcaccacgaatagacacttgctggccttgcccaaaagcacggttaacagcaacacctgaaatacgaccaagtgcttcacctacatcgctatcaggaaacttaccgacatcttctgcagaaacagcatcgacaacgctgtcagcaaagcgcttagtattcattgaagcttcaagtgaacggcgaataccgcgaacttcaattacttcaacatcttcttgaactttagtttcttctgctgcgtatgcagcgccagtgaacccagcactcattacgaggccgatattaactgctaataagcttttcttaaaatttttagctaacacaggattccccttgaatcattttgttggttttttatatcacttctgcccagtgatgatgacaacgctgtcatctagtaacaaaccatacactctaaattacatttgtgctacatctttttggttaatttgtgcaaaaaatttacaacgaaataatcaagtaattgatataactaatatttaatattgagtttttaagaattgttacaaataaacggcgcaaatatagcatgagtgatattacagatgaaaagaccaaaaggatgagtttttgaaaacagctaaaaataacgtgtaattttgtaagcttaagttgccactgtacaactattaaccataactaaaagttatataaaaactgttatctaacagttgattagcttaagaaactagcttgtttctaaaagcactctgtcatgtacaatttatttttaactttttctgggcagagtaagctaaaggggtttgagaataacaatcaataacaatgacagcgttgtcatttttaattatatagggccattttgtacttgtctaacactttatggcgctattttaagaaagtgcgttgatacgaaatggtttgtttaaagtgaatatttaacaacaaaaaagcgagcctaagctcgctttagataagttggtttgattaggcgattaaggtgcccaataaacttcaatattgatatgtgggtgatttaatactgcacgcaaaggcatgtcagcaactgcaccgccctctttagcctgtttatatactgcaagtttttcttcaccgctaattaatagcttaacaactttagaatctgcgattgcagataacgttagcgtcatacgctcagtgatcttgccagttacatcactttcaatggcgttaattgcacacactaaatcatctgtggctaagccatgttcaaggccttcggcgtgtgggaaaagtgatgctgtgtgaccatcaggacccatacctaaaatagtcacgtcaaaaggacgctttaatgctttataggcagcttcacaatcagctacaccattttgagccgttaatgcgtcatttttcatcgttacgaaattagctgcagcgccatggttttgtaacagcgtgcttttgataaatgcttcattacttttttcatgatcagcatcaacccaacgctcatcaaccatagctacatcaatgtttgcccagtcaagttcaaggtttgataaatgcttataagctggtgccggcgatgagccacccgataccatcagtaccgcgcgaccatcttctttaataccagcaacaaggctttgttcaaggcttgaagaaagctcagctgttaattcgtctttgtttgcaaagaatttttcaacaattgttgccatgttaattacgccttatcgcctgtgttaaaccatacatgattgttttcttctaacaattcatcagcatcgtccggtccccaagtacctgctcggtataacgaaggggcacctttttcttgccagcgctcaataattggatcaatccatttccaagcttggcgcacttcatcacggtgaataaacagtgatggattatttgccgcagcatctaacattaagcgcttataagcatctgaatggaaaccattactataagcctgagataactcaatgttcattgttactggctctaactgcatttcaaggttatcaagacgcttagacatcaatgttaattgaattgtttcttcaggttgcagacgaataacgagacggtttggctcaatattgcctacgttgtctgtataaacattgtgtgaaacctttttgtattcaacaacgatttcagcacaacgctttttcatacgcttaccagtacgaagatagaaaggcacaccagcccaacgccaattatcaatatgcgcacgaatagcaacgaatgtttcagttttacttgcaccttcgtttaattcttctaagtaaccagggacgattttaccgtctaagttacctggcacgtactgaccacgtacgatgttcgcatcaacatcttcagccactaacggacgtaacgactcaagcacttttaacttttcggtgcggatgctatttgcgtttaatttatttggtgattccattgctactaagcaaagtaactgcagcaagtggttttgcaccatatcacgtaatgcaccggctttgtcgtaaaaaccagcacggctttctaaaccaaccgtttctgacaagctgatttggatattatcgattgatttagcatcccaaaggttttcaaacagtgagtttgaaaaacgaagtgccattaagttttgtacggtttctttacctaagtaatggtcaatacggaaaatctgttcttcattaaagtattcagcaattttcgcgttgattgcttctgctgactcaccacagtaaccaattggcttttcaaccactacacgtgatgtttctgtgattaatccttttgaagataaaatttcacagcagctaccgtatactgcaggtggtaatgaaaggtaaaaaacacgagacttatcagcatcgtgttcatttaaaatatctcttagcttatcccagtcatcatcggcttcagtaacgtttgaaacaacaggaactaagtaagatgcaaacgctttccaatcttttgcgttgtattcgcctttacctaaaaattcttgcaaagctttatgagccgtctcgatatattctttgcatttgttttggtcacgtaccgtaggaaggatgcgcgaaccttgaggtaaattaccttcttgataagcgcgatacattgcaggaagcaatttgcgtaacgcaagatcaccaccgcccccaaaaattacgatatcaaatggatttagcatatatcactctctacattggcaatgccgaataaattaactccatgactctcatgaaatttggcaatgctcgttgttatctggttgatctggctttgtttgatagttccattaacaaaacctgttgaatttgttttgtgagtagcttactcattattcttgtattggctgaagtaaatgagtcttaggggctctgtaaatcctctcacaaaaatacaggccctaagaactccagcgctacccgttcaaaggtatccgttttgcagctattgctgcgaatctgttactgcttacgatgcgttttatagtaagcgatcagtccattcgttgaactgtcatgcggatgacttactgtgtcatcaaataattcagcttcaattttagaagcaagtcctttacctagctctacaccccactgatcaaaagaacagatttctaagatgatgccttggcagaaaatcttgtgctcataaagtgcaattaaacgaccaactgtttttgcatcaaccttgtctaataacattgaggttgttgggcgattaccctgatgaatcttgtgattcaataattctgcaatttctgcttcagatttaccttttgcggttaaatcagcagttacttgctctgcatcaacaccagccatcattgcttcggtttgtgcaaagaagtttgataataagatatcatggtgcttaccaacatttacttgcggctcaattgaggcaataaagtcagctggtacaattacattaccttggtgcagacattggtaaaatgcgtgttggccgttaataccagtcataccccaaataataggtactgttgtgtaagacactgtttcaccatcaaaagtaacgtgcttaccgttactttccatctcaccttgctgtaaatatgcaggtaacatgtgtaatgcttggtcgtaaggtaaaatagcttgcgccgtataacctaaaaaactcgtattccaaacacttaaaagcgccattaataatggtacgttgttttcaaattcagcatttttaaaatgctcatcaatttcaaacgcaccctctaagatttcttcaaatgcttcaaagcctaaatacaaggcaattggtaagcctatcgcactccataatgaaaagcgaccgcctacccaatcccacattgtgaatacgttttcatcagcgatgccaaaagctgctgttttctctaaatttgtactaacagcaacaaagtgcttagcaatgtgctcttgagcctgtgctgtttgcaaaaaccattcaaccgctgatttagcattagtcatggtttctgatgttgtaaacgttttagatgaaataacaaataacgtcgtttcagcgtctaaaccttgtaaaactgatgcaatctgaacaccatcaacatttgatacgtaatgaacattcaatgtgtcatcagcgtaggctgcaagcgcctcagttgccatttgcgggcctaaatttgaaccgcctacaccaattgcaacgacatctttcaccgctttacctgtgtagcctaaccactcgccactgcgaaccttgctaacgaacgctttcattttagcaagctcagcgtttactgcgtctgttacgttttcaccatcaaccattatagctgtattagcacggttacgaagtgcagtatgaagtacagcacggtcttcagtaatgttaattttttcaccactgaacattttttcgcgccatgcgctaatgtcacactctttcgctaaagagattaattgttcaaaaactgttttatcaatttgttgcttcgagtaatcgaataatacgcctgggatctgagctgagaattgctcgaaacgcgtgctatctttggcaaataaatctttaagatgaatttgtttcatcttcttggcactttcagatagtgcttgccaactagctaattgcgaacggctgctcatatatataatcccctcaaaacttgcaacaaactgatttttaactatctttttattaatgttgaataaagacagcaattaaaaacacgatgaaaattaacactaagttaaaatgacaacgctgtcaatgttctacttttacattttatagtcgagataatagcgcaatttttctcttttgacaccggtatcataaaaattatctcaattattttactgctaatttggtagaacattagatacactaactaacttatattaaatattaatgtacctattaagaaaaagcgctctggtgaacacttttcgatattattataatacaaatataactaactataaagtaactgtatgaaagtaaccataaatgatgtagccaaactcgctggtgtttcaatgaaaactgtttcgcgagtgatcaataaagagccatctgtcagaaaaaaaacgtacgacatagtgatggacgctgtaaatacgttgaactatcagccaaaccttgcagctcgtaaccttgcaggcacatcgtcttttactgttggtctggtatatgacaaccccaatgcatactatgttatcgacatgcaaaatggggtgctatcacgctgcaaagaagaaggctatgagttggttattcatccatgcagctatcttgatgcgaatatgcaagaagactttaaaaccatgatcaagcgctcgcgtttggcaggccttgtattaacgccacctctttcagagcaaaacagtatcatagaaatgcttgacgaaatgggcattcattatgtgcgtgtgctttctggtcgtcctacagaggaagatcaagacacctgtatttatgtaaatgactacgcggcagcgtacgaaattactgctcacctactctcgcttggtcataaaaatatcggctttttatgcggcgacaaagaacataagtcaacaactgaacgcttagagggttatcaggctgcgctaagggatcacaacatcccattgaatgatgctctgatctacgaaggccaatattcttttgaatctggtgttgaaggtgcaaaagcattgcttggtgagaataacccgaaaaacattacagccttacttggcggaaacgatgagatggctgcgggtgcgttatttgcttcacgattaatgggcattgaaattccacagcaactctctatcactggtttcgaagactcgccattctcgcgtcaaacttggccgaaactaacaacagcccatcaagcgaatgatgtgatttcacagcatgccgctcggttattgtttagaaaaacccgtggtgcacgtaatcaagataaagacatcatcacgacctttaccccttcattagtggtacgggaaagctcaggcccaacctcagcttaatttattcaagttacaaaaaagccgctatttagcggcttttttgtttgatgactgaattgttctgatatcaatcaaaacaatgctaaaccaccatttaagttatacacattttcaaaacctaactgcgacaaattgtttgcggcttgttttgaacggttaccactacgacacaccaaaatgtagttatgtgctttatcaagctgcccttggactatagcattagccatacggcttaatggaatgttgatcactttgctatcagcaactgtaaataactcagctaaattattcgcaccatgttcataaggttcgcgcgtatcgataaggtaagttgccttgtcgtctaacattgctttagcgtcggttgctgctagctgtttcatcggcgcactttcaagtgtttcaacatagccacataaagagtgactctctgcatgcttttgttcatccgcttgttgctttaactcaacaaactgaacatctgatacttgctcatttaatagttttgctaataatggcgtcgttgctttttgtgcgtgccaatccattgcaaagcattgttgataatcatgacctgaacaaatcactgttgaatctgtgattgccattgcaagctgttttagtgattgtgccatttttgctgcatcgccaccgctaattgccgtgttacctaagccacctggtaagattaaatcaccacagaaacaatagctgacctcaccactttgcgtatctgctaataaatagctaacactgtcttcactgtgacccggtgtcgctattttgcttaagcgtacaccgcttaattcgatagttgctgaccctttcggccaaccaagttcatctatctcattggcaacataacgctctgctagctctttggttagtaaacaacgagctgataaacgctcttggtgattatgcgtatcaataatcgcttgaacagttaagccttgtgtcgcgacaatttttgccatgcgcgggataagctcaatgataggatcaatcaccactgcgtttttatcgcaatcaacatacagccaacaacatgccgcctgatgacgtagctgtgttaagccaatcgcacagacttcttgctgaggcgatgtgctatcagagacaactaggcagttagcttctagaatcggttttaaagaacggattttttcacaggcaaagtcaatttcttgttggcttgcagctgggccaaacgacatacgaatcgcattttcactttgccaattactagcgcccattgcatcaagcacaaagctacgattagcaccagagctacatgcagagccaccgcttactcggatgcccgcagcatcaaataagtccatcacttctttactggttagttcattaactgcaaagtttaatgtagtgggcactgaatgctcaaaactatggttaaaagtaatgctaccaaacgtatctaagagagctgcatgtaactgcttacgataatcatgcaactgctcaagaggcttaaatgtctggttttgtttatcaagtagtagtgagaacagtttatttaaaccagcaatacctggtaggttctcggtgcctgagcgcattccgctttcttggccgccacccgctataaatggtgtgtacgcactgcctttacgaatatacagcacaccgatacctttcggtgcatacaatttatgaccagagaatggcgcataatctatcgttgtttcgctaagtgctaaattggtttttcctaatgcttgaacacaatctaccatccaggctacattattgttctcactgcgaattactcgctcaatggcggttaaatcttggaacacaccggtctcgttatttactgccatagtacagatcatcaatgcattagcagcatgttcacgaataaactcaagatctaaaataccgtttttatcaactggaatagctaaaacgcgtgcgtttatatcaagcacattattccaatgctttaaggtatttggcactgctttatgttctgtagccccataaagtaatacagggttctcgatttggtgatttttagcagcaataagcgttgaaacaaccgccgtttgaataccttcggtcgcacctgaggtaaataaaatatcgccatcggtagcacctatcacttcgcgtgctttggtgcgtgtttgttctaataggtgtttagcttgaatacctgtaatgtgagagctcgatggattaccaaagcaaacttgcatcgtgtgcgaaacaacatcggcaatgtcagaaagtacaggagtcgttgcattcgcatctaaataaatttgttgattagcatcgtcagaaaggaaaaaacttgccatgaaaaacgcaccatattactaaaagatatatcttataacctattttacagttttcacggctaaattataataatcaattagtcagtaaagtgcgttttctatactttttaagactaagctagcgctcaatcaactcttcttttttagatgaccatgcatttataagtgcttttactaatgaagctagcgggattgcgaagaacaccccccaaaatccccataaaccaccaaaaaacaacactgcaacaattataaacaccggatttaagtcaacagcttcagagaacagtaaaggcactaacacattgccatcaagtgcttgaattacaccatagatgattagaatggtccaaaactgcgtttctaaaccaaattggaacaacgccaccgcagccacaggaatagtcaccagtgccgcccccacaaagggtatcaatacagatagaccaaccaaaacacctaacaaggccgcgtaacgtagatctaaaacggcaaaggcgataaaagaagctgtaccaacaattaaaatttcaaataccttgccgcgaatataattcattatttgctgattcatttcttgccaaacttgaatgattaagcggcgctgcttaggtaataaacgttcagcactttgtataagttctaacttatctttaagcataaagaacacaagtaacggtactaaaatcaaataaatcaaccaagctgccacatcttttatagacgttaatgacactgatagcactaactgaccaaactcaatagctttggtttcaacactggtaacaattgatttaacctgatcttcagtgatcaaacttgggtaatcctcaggaagatgtaaaagcagcgctttacctttttcaatcatataaggggtttcttgcacgaggttactggtttgctgccaaagcacagggcccatgccgacgataatggtgatcattaagccactaaacactaacatgacaatgattgtggcagtgaagcgttttaaacctagcctttctaaatgcgctacaggccaatccagtaaataagcaattaccagcgcgactaaaacaggtatcagtaaggagccaaaaaaatagaaaaatgcaaaggttgcaattaacagcaacaataaggttactgaatggggatcagaaaatttattttcgtaccaagcttttacatattcaaacacaaacgggctccacggttaacacacctaattctaggtcaatttcaaaatggtaatgatgtttttctaaaaagcgctgcatatcatcactagagtgtgcagcattaaatgtaaaagtgacgggttgattaacagattgtgccttatttaaccctaatttaaactgaataaattgttgtgggcacttatagtcccttaaatcaaccattaacatagcgaatcaactgcgttattaatatgaataataagtataagatgtcagcatcttggaaaaataatcctttatagtgagaagaactcatttttttcttaaaacacgcaaaacaatagtttatccttaatcaataactggtagtaaaggaaacacgatgcctggctcgcataataaagcgcaattgcctgcgaatccaactcttaaagagattaattggtataaaaaacaaataaactggggggagttgccgccattttaccatttggtagcatcgtcagtgagtgaatctgagggtattttagatcatggctttgacaatgcggtaaaaagattaatagatcctagaaattggaaccttgagctactaggaggctacgaaaccgacatgggtgaaattgtctgtgagcaaaagccacgcatcgcattgcaccagagctttaccgatcgaggtttcgaattatgggcctacccctttgctaaagatgtcactgttgatcaatacatcaaagacaatcgatttatggagtttagagtctgggatccgcattcaatgaggaaccttatacgctttaatcaactacacaaatttatagctttttattttgaacgtggcgataaagctgataaagccttaatcttacacgcacacaaagtcgtacataaaatcataacttttttacaacgggagttgaacgttgttaagctagacggagtcacaataaaagatttctatcaattgtgtgaaaaagatagccgagcatgcagcgacgaaatagacatagcaaaagtcatgttaggtgagcaaatcaacaaggaataagatgcgactaaaatcagcctttataacactatgcagtgctttactaacattttcgatactgcatagtgagccgttgaaggcgcaaactaattttaagctgcccgatttagggacctcggctttacaagccttgcctattgaaaaagagcaagcaataggcgaagtaatgatgatgcaaattcgtggctcatcacccgtcgtcaatgatcctgtgcttgatgaatacctaacgacattaggtcgtcgattagttgctaacgcaaacgatgtgcgttttcccttttcatttttttggataaacaacccagagataaatgcttttgcattttacgggggtcatgtgggtgttcatacaggcctcatcgctcaagcagacaacgaaagtcagtttgcctcagtgctcggccatgaaattgcccacgtcacacagcgccatttagcgcgtcgtattcagcagcagcaagataacagcgcacttactattgcaggcatgattgcggggatattagcaaccgttgttgctccagatgctgggatagcgattatttcagcaaaccagactcaagccgcatttagtcaacttactcatagccgtgcagctgaacaagaagctgaccgcatcggcatgcaaactctcaacaatgcagggtttgatccgcgccaatcaagcgagtttttaaccaagctcgctgcgcaaattcgctataaatataagccacctgcatttttgcttacccacccactacccgaaagccgggtatcagatgtgcggttacgtgcagagcaatacccaaagagacattactcagacagtctcgacttcaacttagccaaaagcagagttatagcaaggtatcaccaaaaacctaaagcggcagaagatcttttccgtaagctgatgcgtgataatagcgtacataacgacaccgccttgaaatatggattgggtattagtttattggatcaaaaaaagctagatgaagcagccagcattcttaatcctctgcttgagcaagatccaaagaatttattttatatcgatacccacaccgacttattaattgcccaaggtaaagccgatgaagcggttgagtttttagctaagttagatatcgacagacctaacaatcaggttatcgcccttaactacgctaatgccgccattgaagcaaaacaatttgatgttgctgagcgtattttaaagtcttacttactcgcaaagcctgatcacaaccttgctaaagagctcattgctgatgtgtacaaaaaacaagaaaacatggcctcctaccatgaagcccatgcagatgtactggcccaatatggcgcttatttaaaagcggccgatgaaattcaaaaagcgctcaattttgttgaacccgaagagttagtaaaacagcagcgcttaaaagccctactcacgcaataccgacagttacaaaaagagcttgcgaggctttaagtcttgcactgcttgccctaaaataagccaaattattaaaatcagagaccacgctatgtctgtaactatttaccacaaccctcgttgttctaaatcacgtgaaacccttgccctattagaaagcaataatgtgcagccaagtgttgttgaataccttaaaacaccacttaatgaacaacaaattgcaacgcttgtgacacagctaggctttacctcagcgcgtgagttaatgcgcacaaaggaagatatctacaaagagcttgaactgaaaaacgagcaagacgagaacaagttaattgctgcgatggcggccaatccaaaactgatcgagcgccctattgttgagaacaatggcaaagctgctctaggtcgtccaccagaaaacgtattaagcgtactttaatggctataaacattgttgtgctataccactcaagccatggctctttggaagctatggcacatgagatagccgagtcaattgagcagcaaggtgctacagccctactacgcacatttgtgcagcgtcagccgcacgatattgtgatcagcaaagatgatctaattaattgcgatggtttggcatttggcaccccgacacgatttggcatgatggcctcacaagcaaagagcttctgggaaaccaccagcgacttatggttaaaaggtcaattaatcgacaaaccagcttgtgtgttttcgtcatccagtagtatgcatggtggtaatgaagccactttattaaatctatcgctgccattattacaccacggcatgatgttgctcggtgtgccttatgaggtgcctgaattactcgcaactgaaactggtggaacgccttacggggccagtcatgttgctggtagcaacaacagcaatgtattaagtaaagacgaaattaaaatatgccaaagtgttggaaaacgtttggcgcaaattgcgagtaaattacaatgagcgtggacactgaattaaaacagcccgtagccaaaaagcctatcactaaacgatttcaacgttttgcgttaataggttatattggcttattagttttgatgccgatttggttgtttttaattgccccaagagaaggacatagcaatgcctttatctttgtagtttatatacttcccctgctgctaccacttaaaggcattattcaagataaaccttatacctatgcatgggccaacttcatcgtaatgttctattttatccatggttttacattactgtgggtggcacaagagcagctgatttgggtgttacttgagttaacctttgccagtttgatgtttataggctgtacctactatgcacgccaccgtggacaagagcttggtcttaagatacgtaaattaaaagaagagctggctgaagaaaaagccgctcacgagcacgataaataataccgattcttttatctaaagatgaaacaaaaaacggcaactaaggttgccgtttttttatgtcatatttgctaatcgttaactaatcacactaactcagctaaggtagctaaagcgacgatacttgccagaccaacttgcccgattaagctaagtaacgagaacattcttaataagaaaagtccccatggatggcgtatatgcgggtaaagtgcgcatcgcttcaaactggtagcaaagaaaaagcacagaatagaaaccagcgtaaagctaagtgttaactcacttttaatggcaatactgtcatcaaagaagaaaaacaattgcacaggaaatagcaaggtaactatggcgtgcaagaggtgcacttttttaacgcggtcaaactgcccttcaggcgaaagctctttaatcccgaagtcatgttcaagaaccttgactaaattatcagctttaatactcacagctaaccgataacaacttaaaccatctttattgcgtactctgaagtcaaaaccatttttgagtaacaaaacgagtaaaggcgcattttcagcgaacactgcgtaatgaagagctgtgttgcctttattgtcttgaatggttttatcttggtgctcaagcagggtttcaacaacattgacataccctttctctgttgcccacataaaagctgttttaccattctcatcagctagtgtgccagtagccccttgttcaataaagcgcttagccatggtttgtttggcgctttcatggcttaagtgagcaagcaatgcttgttctaaaagagacaccgaatcaacatccggagagatcaatttaagtaacgtgaaataatcctcaccgtgcgcaactttttcagaggctaacgcagttaactgctctaaatcagccacagagtcagggataaatccgctaaaacgttctctaaagtctacttcggtccaaagagtcagcacatcttctgcagacatcttagccccttgctccaagacatgctcaatcaccgtaaagtatcggcgattaaataactgttgaatcaatgtaatgggcgtttttaccgctgattgggcaaatgcacttgcgtatttttctaaacgctggcacaacatcagcactaagctctcaggagtatattcattttctaaaaagtgctgtttcatcgcattgatatagttcaatgcagcttcgtcaaactcagaaatatgttgaaaatagcactcttcgaatggatctagtggagttaaccaagaaagataataaataggcggaaggactgtcgcacagacaccatcatcttcattggttgaacgacatgcaggccaagcttctaaagcgtctaaaatataagccccgttttgctcagctaatcctttgatcagtaacgggtactcctttggccaaattagtacattttccattaaaacaacacaactccgctcacgcattattaggtgacttattaagctctacgttatagcaaaaactagctgacactgagcttaataatgaaacaaaacaacgagtatctaattcgatacttcaagatgaaaaaactagcttgattctaccacagagggcaattggtgctagcgcaaagtaggtgatttttaaagaaaatagaaaagcagtggtacattggtaatactcactgcttggttggagactgctacttacttgctaactcttgagtcactttatcaatgcccacttggctgatacgttgaagtacttctttttgcttagcacttaataaagaaataccttcagcaacaatatcgtataccttccattgcttgtctttaccttggcgaagtttaaagtgtaaatcaatagtcggcgcattatcatcaatgatctgagtttttaccgttgcatatccgtcatctatcaactgtgatggatcgaacactactttttgcccagtgtatttcatcaatgcacccgcataagttactgttaagtaatgctctacagctgcgataaaatcgattgcttgctcacggcgcaacccttttatgtgtttacccaacaacttatatgatacgaacttggtatccatatggggcagcaaacgtttttcaacaatactagccattgcctcagtgctagcgtcacctttggagtttacattagcaatatcaacaaataagtctgctgtgactgactctaacaattgctttggcgaacggtcttcgctagcaaacacgcttgtagtaagtaacgttgcaattagcaaaagtgagttaactaatttggtcatcatcgtattcgcttgtgattgaaaatttccgccaatataccgatattgaaaccacaaaaaaagaaacaatacgtcaacgttttaatgccaaattggcatcaatcggtttttaccaagtttttcaatggattgcttaaaaaagcgagaatatgcacaagttctgtgtatttacgcacattgaaaaagcaatgtcaccacccctatctacttgctcaaagtcatagtaagaattaccgatatgaaattaaaacagccactaaaagcacttgcactaagcacagcattactaatagcaccatcgattgatgccgcccaaaatcatggctatgccattgattacattcaaggtgaaggtgatgtgaaagggttaaaacttgcctatcaataccatttaccaaacgaaaaactgccttttgaacatgctcgggtatacttcgaatcaagctttaatgtttggcagtatggcaaagacaacagacatcaaacgaatatcgtgttagctatctctccagtgatccaatacccggcgtttaatgtgaaaaacatacccgttcatgtggagtttggtattggggtttcactgttggatgacacccattttgcaggcaaaaatgttagtactcactaccagtttgaggacagattaggattagtagcagacctaggaaacaacacaagcttagcactcaggtatttacactattcaaacgccggatttaaaagccctaaccctggacttgattttatttcactgtcttatgccaaacgattttaagtgctactattgtgctgcatatatttacaggatttcaagatggaaacatggcaaattataggcatttttgttgcagtatttggtgtagtaattggtaacctcatgttgctaaaacatgctgcgaaaatggacttcaaggtacctaaagatgacactggtaaagataaaaaaagccctgatgaataatcagggcttttttaaaaaggcttagcttatttatactagccaatgcgccattaagacaataaccggtaatgtcactaaggttctcaaaataaagatgaagaatagctcaataatatttaccggaattttacttcctaaaagcaaagcaccgacttcagacatataaatcaattgcgttacactcattgctgcaataataaaacgtgtaacgtcactttcgatactacctgcagcaagaattgatggaataaacatatctgcaaaaccaaccataatagtttgtgctgcagcttcggcttcaggtacttgaagaagctctaaaaatggtacaaatggtttacccatatactcaaatattggcgtgtattcagcaatgatcagagcaaatgtgcccaccgccataaccacaggtaatactgcgaataccatatcaaatgcgttgtgcagaccttctttaactgtacctacaaatcccggcgcagtgcgcgctttagcgaatgcgacatctaacgaatgcgaaattaaggttttaccttcaggtaccaactcagcatctttatcgggctcgctaccatcaaaatataaatctttcttaaaacgtaatggtggtaaacgaggcacaattagtgctgccactaaaccggctaaacatacagttaaataaaacggtgcaaataagtgctcaagctttacttgaccaataacaactaaacaaaaggtaattgatacagctgagaaagtggtaccaataatggcagcttcgcgttgtgtatagtgtttatcttcatactgacgagcggtcatcaaaatacccacactaccgtcacctaaccaagatgccacacagttgactgcacttcgacctggcacaccaaaaagtgggcgcatcactttagttaataaggtacccactagctcaagtagaccgaagtttaataataacggtaataataatcccgctaaaacaaacacagaaaacaacacgggcaataagtcgtttaacaccaatgcaccggtattaccggaaataatcatttctggcccttgttttgtataggtcagaataataaataccatacccagtaatcgaacactcagccaaagccaactaacatcaaataaatgtttaattataaagtacttaagtaatggctgtggtttaaacagctttatcactaaagataaaataccggtgatacaaacaatactggtaatcaaacccagtgcaaaaggtgcaatccattgttgcactgcttttgccataacagcaattgggatggtcattgcttcacctatgggtaccggcgtcataaataagaagacacctataagtgaaggaacgaaaaaagtgaacaaggttcgcatgtcgatgcgatttgttgcgtttaagttagacatattttcaacctgtagaaaccacaaaaagagcggctaggctctttttgtggtggtttaatttttttaattattaaatattaattccacgctgacgcagcgcgttttctaatgcttgttgtaagtcattcattgtaccaggctctagcgtagcaccttgcgagtccatccacgttaaacttgtaccaccatcattagtgcggctaacgagaatttggtactggccatcttcaattggtaactcagcaacttcttcgccccaaattgaatcccaaacacttgactctggctttttataatcagcagtgatcaaaccacgctcttggtcaatctcaacaattgtgaaagataaacgctctaagaaaccagaaaaacgatcgaataccatgctgtattcttgctcagttacaagcgcagcgttgcctttgttatcaaagcccatttcaagagaaataatgccttgttgcttacgcatttccacttctaactgacggtagcggtaatcaaactcagcaataatctggttaagagcacgcacttctagttgttgctgtaaaagtggcgtcaattgttgtgaaccgcttttataatcaacaagttttgaggttaaagaagctgtacgttgatgcgacttctcttcaattgtaaataaaaagcgttgttgagatacttctttttcactttcccaaaaccaaccatcttcaggtttaataattgtataccagcctgtttcgatgctatttgttgctttgtcagctttttctacagaagtatttttctctgctaataccgcttttatagagtcccaaatgaatgtatctagatcttcaataccatcatttttatcaaaataaacccgagctaatttatcaccttcttccacccaagttccttgcgcgatggtaataacctgtgctggcggacgataattttttgcttcagggttgttgtcgtattgtgcaacatccattttgtaagtcggatcttgagtcggttgcgcaaggcctgctggcgctttgaccggttcatttgcacgataattacgcttatggtgtgcttcatcagtgaacacactgcatcctgttaaacttaccattacgcttacagcaagcgcctttgagatccaatactgcacagatatttctccttagcaaacccttaattttttaacaaatatatgagtgggtaatgccgatttggttcactgtaaaatcatttataactttacatttattgtttttatgcaaataacccgagcaatttgggttaacgcgtcatgtatatgtttacttatcgccttgcaaaattttaactatggtactttctgatgcccctaaaaacaagaaagagcacactttattaacggcttaattaatcgcagctaccgttaacgatgttaattatggtaaacttcgccgccgtgcagtattaaactcacgtgaaatcaaggcttattggcttatacccattggtattatttaattactaggtacttaaaattccatgactgctttttcaaatcatcagatagtgctcacagcgattggcgaagacaggcccggtatcgttagcgaattaactcagctagtgagtgattgtcattgcaatattattgacagtcgcattgctatcttgggtaatgaatttacttttattatgttattagcaggcgatatgtctgcaattagccgaatcgagcataccttgcctacaaaaggaatggaacttggtttattaaccatgatgaaacgcacagcaagtcatattgcatgtgaattttgtgccggttacacccttgaatatacgggtatcgacacaccgggtacattaagcaaagttactcgtttttttgctgacaacaacatcagcatttgttcacttaagtcagacacttatgaagaagacaatgaactaaaaatgcgctgtgaactggagtttaatatccctgtcgacgttgatattgataattttaaagtgagctttgaagatctttctcgtagtttgaacgtagattatatctttagacgcattcgttaaggagcactgtatgaagaaaattaatcctctacaagcaggtgacacagcccctgcttttagtctacaaaatcaaaacgatgaaacaatcgtgttagccgatttattaaaagagcagcaagtactggtttatttttatccgaaagcatcaacaccaggttgtactgtacaagcagagaacttacgtgacgaaaaagctgagcttgctaaatttaacacccgtatcgttggtataagtccagacccgatcaagcgtttaaaaaactttgaaaccaaaaaagagctgaactttgatttattagctgatgaagatcatgccatagcagatgcttttggtatttggggctataagaagtttatgggtaaagaatacgaaggaattcatcgtattagcttccttgtaggtcaagacggtaaaatcaaacacgtgtttgataagttcaaaaccaaagaccatcatcaggttgttttagattatctcgcgcaaaactaatttttaaacaaaaagcgttacttttggtaacgctttttgctaaaaatactatcttcacgtacaaaaaacccagcaatcgagctgggtttgtaattttaaagcagcaaaacagattattaatccatgatgtcttcaggcatatcgccacgaatttgctgccaaatctcacctgtttgatgaccatatttacgcatcatcgaaattgcaccatcatgttcacgtcgctcagcaagttctgttaggtctttatagaactgacgtgctaattcgcgtgtacgtgagtcagagaagtagtgacagccaattttagagtaaaaacctttaaagccatttagtatcaacacgtaaatacggttattaccagccacagcaagctcatggtgaactttgtaatcataatcagcaaatgcctgagcgctgtcttctagctcttcgctctgcgaaagaatttcaattacacgctcaggtgctaatttaatagctgcacgcgtgtaaatagcactgatattggttcgtgccgaaagaagttgatcggtaagctctggcattttatcttcatcaagacgtgcgagtgtctctaagatattaagaccagacgtctcccagaaattattaacacgtgttggtttaccgtgttggatcgttagccagccatcacgcgctaaacgctgaagtacttcacgtaaggttgtacgtgttacaccaatcagctctgacaattcacgttctgccggaagaatcgatcccggcggaaagtcaccattccaaatagattcaacaatgtattcttcagcaaaacctgctgggcttttcgctttaaaaattctcattcattttccacttgagttagcaacttttattatcgcaatgtgcgaacaacccactgattgtaccagatgatccgcaactaacaagtaaactaagtccggtgtgcataaaaatctattatttatagctaaataaaagccctttcggcccaataagacaccaaaagaataatactttaagtatagtaaatatacctagttaacaattcaaataagctctaagcttagttaacttgaaataacaacaagcacaaataataaggtacagcgatgcagcagcggattttaccagcgatctttaaaaattttttggggacctcgcctcaatggtataaatacaccattgtcgcctttttactaataaaccctatattatttcaacttaacccctatcttgcgggttgggttttagtgttagagtttatttttactcttgctatggctttaaagtgttaccctcttcagcctggaggcttacttgccattgaagccatgttcattgggatgacgtcggctgggcaagttgagcatgaaatagtacaaaatattgatgttattttgctgcttatctttatggtggcaggtatttactttatgaaagacttgcttctgtatatcttcacaaagcttgttgtttcagtgcgaagtaaaactgtattgtcgctgtcgttcacgattgctgcagcttttttgtctgctttcttagatgcgctaactgttatggctgttgtcattgctgtagcgatgggtttttacagcatttatcataaagttgcttcgggaaaggactcgagtagtgaacatgatattaatgatgataatcaagtacgcccggtcaatcgtcaagagcttgaagaattccgtgcttttctccgtaacttattaatgcatgcttctataggcacagctttaggaggagtgtgtacgatggtaggcgaaccacaaaacttaattattgctgagcgagctggctggctattcggcgagtttttctttcgcatgttaccaatcaccctgccggttatgattgcgggtatatccacaactattttattggaaaaaaccaaagcgtttggttacggtgcgaaactgcccgccccgattcacactattttatctgatcatgcgaagaagcttgagaaaaaacgcacaacacgcgataaggtaaacctagctattcaagctgttattgcagtttggcttatcattggccttgctttacaccttgccacagttggtctaattggcttgtctgtaattatttttgctacagccagtgcaggaattatagaagagcatcaacttggcaaagcctttgaagaagcattgccttttactgctttgttgtgcgtattcttttctattgttgccgtcatcattgaccaacatttatttacccccgtaattgcttgggttctgacctttgaaggccaattgcaacttgtgatgttttttattgccaacggtattctgtcgatggtcagtgataatgtgtttgtgggtactgtttatataaatgaagttgcagctgcactcgaagctggtcaaattactcgtgaccagtttgatttattagctgtagcaattaataccggtaccaaccttccaagtgttgccacaccaaatggacaagctgcgttcttattcttacttacttcaacgttagcccctgtgttgaggctatcttatgggcgcatggtttatatggcgctaccttataccatagtgttgacagttgtcggtttaagcatgaccttattcagcctttctgatatgactgatttactgtatcaatggggtttaattaatcaccacacaggtgcgttaccaggctccttaggtggccattagggcaattattgccaacaacacatttgaaactaaaaagcccgcttgatgcgggcttttgtttaattaaaccaaattattaatctaacactttcgcatcgtttgctttattaagtaagctacggctttgtgttaagaaatgtgcagttgcatcagagaaatattcttttgcgttagcaaaggcatttattaatgactctttatcaccagcttttagcttctcaagagtgtctgcaaaggtgtcttgataactcgcaagtaacggctctacatcatcaaattgcgccagcatgatgtcagagtacaactctggtgactgggcaaataaacgccctaccatcattaactctaactgataaataggtgaagagcagctacgtagctctgctaacgtatggctttgtttagctaagaattgtccgtacacaaacgttgttaagtggcgcattacttggatgatttgcatcgcttcatcatgctttttggcatccatttcaactacttgacaaccccagatctgtaattgtgccattagcccttttgctacttcatgatttcgcccttcacacactacgaccgtttgttttacccagtgcgaaatatctggaccaaacattgggtgtaaacctaccacagggccgctgtgagccgccatgagggcttttaaaggcttttgtttaactgaggtaatatcaactaataaacagtcatcatcgagtgttggtaatgcagcaacgacttgctcaagtgcattaattggcacacttacaagtacaagttttgcaccggctaataccgcttcgctgtcggcttgttgctctttatctaaaattcgtacatcgtatcctgagcgaatgaattgttgtgcaaacaattgacccatcgcaccttgcccaccgacaatcacaataggagataactgaggagctgaacaagccaaactcccttgttgattttgatatgcttcacgcatcatacgacgcagaatatcttcaactaactcagggttaactccttgtgcaatcgcttcttgtcttcgcgcttcaagtaaatcagcttcgcgatccggcgcatgcaaaggggcgccaatttgctgcttaattgcaccaattttagccgttatactgtttctttttgccaacaaggaaactaactgcgcatcgcattcgtcaattcctgtccttaattcatcaagctcattcactgttaccacgttaatacacctcaaacccaaaaacgtacaaaaatatatacaaaaaagtaaagctttcaatacgaatcatagtaacaggataaacagcaaagcacaaagccctaacacttctacacggcttgaatcacaagggaatatttaaattagaaagagatattaagaagtgctgacaattaaatttgaaagtcgtaactagatattttttgctataaaaaccaaaacgggttgcaacctaaggctgcaacccgttttattttgcgttgtaaaacagcgcgtattagttaagtttttctctaatacgtgcagatttaccagaacgctcacgtagatagtaaagtttcgcacggcgaacagcaccgcgacgtttaactgagatactatcgataagagggctgtgcgtttggaatacacgctcaacaccttcaccgctcgaaattttacgaactgtgaatgctgagtgaagaccacgattacgcttagcgattacaacaccttcaaaggcctgtagacgctctttgttaccttcttttacacgtacctgtacaacaactgtatcaccagcgccgaatgctggtacgtctgatttaagctgctcttcttcaagcgctttaataatattttggtttacttttgccattatatttctcactttcctaggtgtaactgtcttctagccacaagcttgttggtactcttgctggaactcagcaagaagtgccgcttgctcctcagtcagagctaggttatgcaacaagtcaggacgacgtagccaagttctgccaagtgattgttttaaacgccactttgcaatttcttggtggttaccactgagtaatacagcgggaacctgcttatcatccaatgtctctggccgtgtataatgaggacaatcaagcaagccatccgaaaatgaatcttgctcagctgactggttatgccctaatacccctggtactaatcgtgctactgcatcaattagcgtcatagcgggtagttcaccaccacttaatataaaatcgcctattgaccattcttcgtcaacgtacgactctataattcgctcgtctataccttcatagcgaccggcaattagaatcaacttatctgagttggcaagctcgcttgccccttgttgatctaatttgcgcccttgcggggacatataaattacttttgcaccatcacctgccgctttttttgcgtcaagaatggcttgtttcaatggttcaaccatcattaacatgcctggaccaccgccataagggcgatcatccacggtcctatgcttatcagttgcatagtcacgtgggttccagcaattaaagtcgattagaccatttttaactgcacgacctgtaaccccttgggtagttatcgcatcaaacatgtccgggaaaaggctaatcacccctacccatagtgaacttgtttgtgacattaaaaccctggatcccagtctacggtaatttctcttgcatcatgtttaacttctttgataacagagtctgttaaaaaaggaattaaacgttctgcttggccaaatgcatcttttttgtttgctttcacaaccaaaacatcatttgaccctgtctccattaggtcatcaacagtgcctaagtcgtagcctttatcggttacaactgacatgccgatgagatctcgccaatagaattcaccttgcggtaattctggaagctgcgctgcatccacggaaatttctacattggtcaaagccattgcttcgtctctgtcgtttacttgcgcaactttagcgataaagcctttgttgtggcgacgccagtcgaccacttctaaggtctgccatttaccttgttgccctatcaaccatgggctgaaatcgaagatcccttcgggatcatcagtaaatgaatgcaccttaagccagccctttataccatacggggcaccgagctttcctactgtaatatacgaggtgttctcttgactcatggttactcttacgcctattaagccgctttacgagcgtctttaactaatttagctacgcgatctgaaagagatgcaccttgacctacccagtgttcaacacgagataaatctaaacgtactttttcttcctgaccagaagcgattgggttaaagaaacctactttctcgatgaagcgaccgtcacgcgagaaacggctatccgcaaccacaatttgatagaaagggcgttttttagcgccaccacgttgcaaacgaatagttaccataccgtcctctacattagattgactgttttcattaataagatttactccccagtacgggaagctggggaattgtacgagttttttgcaacattgcaagtaagaactgctgcaaaatgtaagtttagttgattaaacactgatctgggctttaaatcttacactcagctaacaactacgcataatttatctacaaaaaaaggagctatatgccccttttttgtacacgctcaatgataagctcaattaaaatttagggccgccacccatcatacccggtggtaacatacctttcataccgcgcatcattttcttcatgccgcccttgcctttcatcttcttcatcattttttgcatttgcgtaaattgcttaagcagtttattgatctcttgtacttgggtaccagaaccagcagcaatacgttttttacgagagcctttaatgatttcaggacgtgcacgctcttttggtgtcattgagttaatgatcgcttccatttgcacgaaagttttatcgcccatttgaccttttacagcatctggaaggttttgcatgcccggcagcttatcaagcatcgacatcatgccgcccatgttcttcatctgacgaagttgctctgcaaagtcatctaatgtgaaaccgtcacctttaaacactttctcggcaactttagcagctttctctttatctactttcatctcgacttcttcgattaatgaaagtacatcacccatacctaggatacgagaagcaatacggtcagggtggaatggctcaagtgcatctgtacgctcacccacacccataaacttaattggtttaccggtaatatgacgaatcgataaggcagcaccaccacgagcatcaccatcggtcttggttaagatcacaccacttaaaggaagtgcttcatcaaatgcttttgctgtatttgccgcatcttgacctgtcatcgcgtcaaccacgaataaggtttcgattggattaattgcactatgaagtgctttgatctcgtccatcatgtcgttatcgacgtgtaaacgacccgcggtatcaactaataccacatcaatgaattttttcttcgcgtgcgaaatagcgctgttggcaatatctacaggcttttgtgaaatgtcgcttgggaagaactcaacacccacttcatcagccagtgtttcaagctgtttgattgctgccggacgataaacgtcggcactcacaactaatacagatttctttttacgctcttttaagaatttagctagtttaccaacactggttgttttacccgcaccttgcaagcctgccatcatcactactgctggcggctgtgcattaaggctaagctcttcgttggcttcgcccatggctttttcaagttcttcacgaacaatcttaataaagacttggcctgggcttaagcttttcgttacttcaacaccaacggcacgttctttaacttgcttaacgaactcacgaacaacaggtaaggcaacgtccgcttccaaaaatgccatgcggacttcgcgtaatgtatctttaatattgtcttcagttaggcgtccgcggccactgatattttttaaggttttacctaagcgttcttggagattctcaaacatgtaaagtttccgataaaacgagtttcacctaaattgcttgtaaaacgtacagtttattcggcaataaaggcaatattaaaatttaattcctagcagtataccgtaaatgatggccgacaatacagtattcaagtgcgctgtttgagtttctttttacaaactctatgcttttgccttgctataaaatacaatggcatcaatgagacaaggatttatcgaataaattaagtggccataatacgatgattattagtttaacaattattgctagtttgttttatgtgttagcgacatcgcatgtgctttcacgcctttttcacaaacaaggtccaagccagaaactcaccgtgattttgagcaccgttgctattcttgctcatatgctactgttggtgaactctgtttttcgcgctgatggccaagacctaagcattgtaaacgttgccttattgacctgctgggtcattgtggtgtcggtaacggccgtgtcacttaaatttcctgcgacccttttattacctgtagtctacggttttgcagccatactaacgctcgccagcttatttattccacatcacgttattttacaatcaataaatgttgagctcggcttggtaacacatatttcgttatctctattagcttactgtgtactaatcatcgccactttatatgctgtgcagttttattttatcgacaagcgtttaaaacgcaaagacttggcgattgtacatagccatcttcccccattaatggtggttgagcgtcagctgtaccaattactgacgttaggtactatcctacttacctttgcactgctttctgggtttattttcttagaggggatgtttgcaagtgagtttatccataaaacagtgttatcgttagtagcctggttgatttttactgtggtcactgttggacatttgcgtaaaggctggcgtggtaagcctgttgtgttttcgatcatgatagccgcatttgtcttgtcacttgcttattttggcagccgtttcattcaagaagtgattctaaataagttttaacttgactcagcaagctgtctctagcttaatatgcactgatttataaaaaaaggatccatcgttggacgacatatcgactagtaccctgtttattgtattgggattattgatacttatttctgcttatttttctggttctgaaactgggattatgtcaattaaccgcattcgcctgcgtcatcttgctaaagaagatcaccgtgcagcgaagcgcgtcagcaaactgttaagtcgccctgacagacttattggtctgatcttgattggtaacaacttagttaatattgccgcagcacaggttgcaacaatcattggtattcgcctgtatggtgatcttggtatcgcaatagctaccggcgcgctaacgctggttgttttaatctttgccgaagtaacaccaaagacacttgccgcgctttatccagagaaagtcgcttttccaagctcaatcgtgctcaaggggctgttaaaaatacttttcccatttgtggttatcgttaactggatgaccaacggcatgttgcgtttgtttggtattaccacagcacaaattgaagaacatagcctaagtaaagaagaattaaaaaccgtggtaaacgaatcaggtgctcttttacctgcccgccaccaaagcatgctaacttcaattttagatttagaacaagttacggttgaagatatcatgatcccacgcaacgaaatcgttgcgattgatattaatgacgattggaaacttatcagccgccagcttactcatgcacagcacacacgcgtactgttatatcgtgaccaaattgatgatgctgttggctttattcactcacgtgatgcactgcgcctattaactaaagaacaatttgataaaccgtcattgttacgtgcagttcgtgaaatttacttcattcctgaaggcacatcactaaacacgcaactacttaagttccagcaatcgaaagaacgtattggtttagtggttgatgaatatggcgatattcaaggcttagtaacacttgaagatatcttagaagaagtagtgggtgatttcacaacaacgcaaacgcgtacaccaagtgaggaagtcaccgagcaagatgatggctcagtacttgtagatggcggtgctaatattcgcgatttaaataaagaaatgggttgggagctaccaattgatggcccgaagaccctaagtggtttaatagttgaatatttagaagatatcccagactcaaacctcagtttgcgtattgctggctatccaatcgaagttctcgaagttaaagaaaacatggttaaacttgttaaagtactgccaagtaagcgtactacttaatcatcattaattttcaacaaaaaggagtggtcatccactccttttttgtatctaaattcttatttcctttctgaagtttcatatttacaacgtacgctcccgcaaaccgctagtgtttcggctactattagtagctatttaactgccgcatttaataaggagcaatcatggacgaaatatcgatcgaaaacatttataatcaagcaattgagctactgctactctatggacctaaattcattctcgctattgttgttttaatagttgggtggtggcttatcggtcgtatctcaaatatggctgaaaaatcaatgaccaaggttaagtttgaagtgggacttacacactttttggtatcatttatttctgtcattttaaaagtacttctgctgatttcagttgcgtcaatgataggaattgaaactacttcatttattgcaatgcttggtgcagccggtttggccgttggaatggccttacaaggcagtcttgctaactttgcaggtggtgtgcttatcctgttctttaagccttttaaagtgggtgatgttattgaagcccaaggctatatgggcacagtagttgaaattcaaatttttgttaccgttttacttacctatgataatgaaaaaattattattcctaatggcactctttcaaatggttgcgttaagaataagttctcagagccattacaccgggttgcgattgaatttggtattagctacggcgatgacgtacataaagcccgtgatgtgttaatgaaggtattaaatgactacgatctagttttgaaaaatatcgaagagaaaaagccggttgtacatgtcagtcaacatggtgagagccatattggtatgctcgtttgggcttgggttgaaacagacaattattggccggtctattttggtttatacgaacgtgtgaaaatagcatttgatgctgaagatattaccattccgttcccacaacgcgatgtgcatatacaccagttccctggtaaataaccattaaaaagcccgcatattgatgcgggctttttaatatgaaaaccttaactaaataagcgttcaaaccagtttttatctagatcagcttcgcactttttaagttgtgcgccataccggctagctcggtgttttactttattggcaacactcatcaaccactttttacttttataagtaccgcgtttatagccgccccacccttcatggtaattcaagtactgcgcgtaggcgtcccattttgatattccgtttactttatgagttttataaacaaaccaagccataaagtctatcgcatcatcaaaatcgtctctgtctgccccactattaccagtttcgcgaatgtaatctgaccaagttggcgtttttgcttgcgagtatccatacgctgaactggctcggccaataggaatgacccataagaaatattccataggtggcgctgcatcatggcgaaatgagctttcttgatacatcatactcatgagtacgtgtttaggtgagccccacttttcttgcgcatcacgcgcatcgtagtaccagtcaggcttttcctcaaaaatcttacaaatatcatgaggttgctctggaggagccgttgcgcaacccgccattaaagcggccagcgataaaataattaaactttttttcatttttttatgtatctcgctgaactttttctcatcaggtcagtctgaacttatgaatgcagcagtatagcattgtttcatccctgaagaatctttgacgcagcctccctaggctgcgtttttttatgtactcaccttattaagctttagcaaaataatcatctaaaaacgcagtaaaagatagcttgtctgctgcttttacttctcgctctttaagcactgaatcagatgcctgtttagtcaaaaatgcatgatcataaaattgataatcagcctcgacatggttttgcttatatttttgcgcaagtgttaaggcaaaaagaccattatcttgattttcttttgcaagtgcactgacatatcgaccagagaaagttttattagggtttttgacccaacttgcaagctctgcgattgtttcgctgtaatagctcacaccatatgcgttatccatatagttagccacagcagctagattagtaaatatagattcagcccagtcaacaagcagaaccttttcaccttgcttattcaacgtaagctcagggtctcggccttcatttacaaccgcatcaagattagctgtacttaacttttgttcctgccaatccatttctggagactcagacaataaacaataggtcaaaaatacgtctaaaaagcgaatttgctgtaaatcaataccggtttcactgaatgggttaacatctagcgcgcgtacttctatatactcgatcccacctcgtaacaaggcatcagtaggtgtttctcctgaggcagcattacgtttaggacgtatcggtgagtaaaattcattttcaatttgtagaatatttttgttcagttgttttggctgctcactacggtagtcatcaaggtgaccatataggtctgatggcgtatgaatcgcttcttttaaacctgctacatattcttctaatgaattgtacataactcgtaaagacgattgtgcgctattagtataaccaaggttgcctaatcgcagtgccgtaccgacttctaaataaagtgtgcctttacctagtttcttaaacggtaagtctgtttgacgaccctgcaagaaagaattacacaacgcaggcgaagcgccaaataagaaactaattaaccataactcgcgcttaaagttgcgaatgagccctaagtaaccattcgaaattgaatctgcaagtgtgccttggctgccgtttaaactatacaggctttgccataagctttcaggaaaggaaatattgaaatgaacacccgcaatcgcttgcatcatactaccatagcgatttttcaacccttctcggtaaagagttttcatacggccgatatttgaatcaccaaactgagctagtacgatatcatcttggtgctcaataaagcatggcatactaatcggccacagtagttcgtcacccatttgagataaggtgaacttttgtaagtctttaagttgagctagggtttcctcggctgaggtgctcactggagtaataaattctaataacgattctgaaaagtcagtggtgacatgatcattggttaaagcgctaccaacgccttgtggatgaccttgccctgagataacaccatttggtttgatccttaatgcttctcgctcgataccacgtttaatcccattaattgcgttaggaaattgtgccgttaacgcttctagcgttttatttaaatcatgttttatcaaaaatgcttcctcgagccgcgtggctgtaatcctaagggtatgggggcaaaaaataattactcaagtgcgaaaaataacattcaattaccacctcaccacttgaagcacaatcttgccattgtgaatagcattatacaattgctttagtggcacttaattaatgcaaaatctattcatctgtataatttttatcactaacttgtgaacattagaccttttgcctaatatgaaaaggtgaggctaaacacaataattctcgcaagatattgttttagatcaagggaaaggtgaaatttttaaaactttaacagttatcaatatgttcccccttcccttacatttttctgagactataatccgcacaccataaaaaagtacatttcaaggactcatatgcgtcgtgggcaagaaataatcaatcaagaagtgacatactccgaacatcaagagcttgtctctacaacagatttacgcggcatcatcacatacgtaaataaggaattttgtaccattgctggttataccgaagaggagttactcgggaaaaaccataatatagtacgccacccagatatgccaaaagcggcatttaaagagatgtgggaaaaactaaagcaaggccattcatggcgtggcatggtaaaaaacctctgtaaagatggtcgctactattgggttgatgcgtttgttacacctatatacgaacacggtcagctcgttggctatcagtcagtgcgaacaaaaccatctgaacagttaaaaactcgtgcaatggcgctttacactaaaattaataacggcaagtctgtcgcgtcatttcgtgaaaatatttcgctaagacaaaccttatctacggtattattagttgctggcattgttgctttgtcgcttactacgtcatggattgttgccttagctgcagctgtcctcattgcagcactttttgtactcaattatgacgaactcattgtaacgcctagccatttaaaacagcagcgtgctgagtttgactcggtatctcgttatgtgtattcgggctcccacccatttagtattgcgacttataatcagcaaatgttatttgctaagctacgaaccgtacttggccgtgttaaagactctacttactcatttaaagatattgccaccaacctagataagcaatcatcgctaacagagcaaggaattgcagcacagggtcatcgtttaagtgatattgctgctgcgatgagtcagatgagtacaactattggtgaaatatctgcaaacactcaccacactgctgagaaagtcaatacaacgtaccaaagctgtaatgatataaaacttcacattgaagaaaatagctctatggtgtctgaacttgcaaatcaagttgagcaagcagcgagcaccgctaactctcttgccagcgaagcagacaagattggccaagtaatgagtgagattgaaggtattgctgaacaaacaaatttattagcgctcaacgcagcaattgaagcagctcgcgctggtgaacatggtcgtggttttgcggttgtagctgatgaggtacgtgcgctttcatcgcgcactcaaaatgctacatcacaaattcacagctcaataaaagaaattcaagataccttgtttagctggtctaaagtaatgcagtcaactaaaacgcaagctgatagttgtgttaatacaacggcccatactaaaactgagttagcgagtatttttgcgcaaataaatgaaatttcaggtcttgctgcagaaatttcgacagcagctgaagagcaacaagttgtgagcgctgatattcgcgaaaatgtcgacagcatcaaagaacacagtgaggaaaacttaaaacttagctacaacgtcgctaaagacgctgcagggctggttgaaggttcacgcaaagtaaatgatatgctgttaacgtttaaagtttaaacttagttaatacaaaaaagccgcattgtattaatgcggctttttgcttttaaagcatattaacgacttgagaaaacaaggccattttcatcggcgtcaatatgaataatggcaccaggttgataatcgccccctaacaagcgctgtgctaatgggttttcaatggtatgttgaatagcacgttttagcggtcttgcaccataaacaggatcaaagccactttcagcgatacgatctaatgctgcatccgttacttcaagaatgtagcctttttctgttaagcgctcgcgtagcttgcttaattgaatatcggcgatttctttaatatgctcattagcaagcggatggaataccacagtttcgtcgattcggttaataaactcaggacggaactgactcaccaatacgcccattactttttcttttaacgtcgcataatcatttgaaccggcttgctcttgaataatatctgagcctaagttagaggtcataatgatcaccgtatttttaaaatcaacggtacgaccctgaccatcagttaagcgaccatcatcaagtacttgcagtaagatgttaaatacatctgggtgcgctttttcgacctcatccaataaaataactgaatacggacgacgacggacagcttcagttaaatagccaccctcttcgtagccgacataacctggaggcgctccgactaaacgtgcaaccgagtgcttttccataaactctgacatatcaatacgcaccatggcatcttcagtgtcaaacatgaagctagcaagagctttagtcagctctgttttacccacccctgttggacctaagaataagaatgaaccgattgggcgatttggatcagcaagtcctgcgcgagagcgacgtattgcattagcaacagccacaacagcctcatcttgaccaatcactttatggtgtaactgatcttccatttgcagtagcttttcgcgctcaccttgcagcattttcgatactggaatgcctgtccaacgcgataaaatttccgcaatttcatcctcaccgacctgatttttaagcaaactcatttcttgcatttcggcttgtgaagcaaggtctagtttgcgctcaagctcagggatacgaccatattgcagctcagacatgcgttgtaagtcgctggcacgacgtgccacttctaaatctagacgcgcctgttcaagctcagctttgattacttgcgtgccttgcaatgaggccttctcagcattccacacttcgtctaattcacggtattgagcttcaagttcagtgatcaactcttgcatttcggtgcggcgtttttggctcgcttcatctttttctttcgccaacgcattgtcttcaagctttaactgaataatacgtcgctctagcttatctaaagactctggttttgagtcaatttgcaaacgaattgaagaacctgcttcgtcaattaaatctattgccttatctggtaattggcgatcgctaatgtaacgatgcgacagctgcgccgcagcaacaatggccggatcggtaatatcaactgaatgatgcagctcatatcgctcttttaaaccacgtaaaatcgcaatggtgtcttcaaccgatggttcatcaacaaataccttttggaaacgacgctcaagtgccgcatctttctcaatgtattgacgatactcatcaagggttgtggcacccacgcaatgtaactcaccacgggcaagtgcaggctttaacatattacccgcatccatcgcgccatctgttttcccagcgcctaccatagtatggatttcatcgataaagaggatgacttggccttcttctttggcaagttcattcaaaactgattttaaacgctcttcaaattcaccacggtatttagcaccggcaaccaacgcacctaaatcgagcgataatactcgcttgttttttaagccctcaggtacttcaccgttgataattcgctgcgcaagaccttcagcaatcgccgttttacctacacccggctcaccaattaacaccggattatttttagtgcggcgttgtaatacttgaatagtgcgacgaatttcgtcatcacggccaataacagggtcaagcttgccttgctctgctcgctcagttaaatcgatggtgaacttttttaatgcctgacgggtttcttcagcattgggatcatcaactttttggccaccacgaatagcttcgattgcagcttcaattttgctagaagtaatattcagtgctttgaaaatatccccaagtggacctttatcgtcacacgcagcaaggacaaataactcactcgaaatgaatttatctttgcgcttttgggcatatttatcacacaagttgattaacgaaatcaggttatttgacagctgaacatcaccaccaataccttcaactttaaacagcttctcaatttcttgtgataacttggtgtttaactcatcagcactcacacctgcttgcgcaagtagtgcacgcacacttgaaccattttgctgtagcaatgaatacattaaatgcacaggctcaataaattgatggtcgcgcccaagtgctaatgactgcgcatctgaaagcgcagattgaaatttacttgtaaatctatctaaacgcataagggtttacctataaaaaaatctaattgcttaattaatgggtatgcttagtgatttgttcaagtaaagaagaaaatttaatcgcaaaaaaggcgtattaattgcgccagatcaagctagccatgcggccagtttgcccgtcgcggcgataagagaaaaactgtgatttatcagtgacggtacaatgctcaccaccgtaaacgtttattacacctaattgtgttaattgttgacgtgcgagcaggtaaatatccgctaaatacttattgcccttaactttaaatgcactttgatgctcaggattcaattcacaaaagcattcttttacttctgggcccacttcaaattgtgatgggccgatagcggggccaagccaaacaattatctcgcctggttttgctttaaaatgtgtcactgtattagctaaaatgccctgagctaagcctcgccatccgccgtgtgctgcagcaacttcattacccgaagccgagcaaaatagtacgggtaagcaatctgcggtcattatcgcaagcggttgttttactaaacgagtataaagtgcgtcagcagagggcaactcacttagctcagacctttcatcaatcaccaccacttcgctgctatgtgtttggttcaaccacacagcagggtttggcagctgatttgtaagtaacgcgcgatttgcaagcacggcttgctcatcatcaccaacatgtaaacccatattaaaactatcaaagggtgcaacggatacaccgccctgtcgggtggtactcagtgcgctaacagtttttggggctgtccatgctggtgtgatcataatgcttaaaactcgatatttgggtttgctttagtatcagcacgaagagcttctgtcatcgctgccatatcatctggaattggcgcttgccatgtcattaactcacccgttataggatgcgcgatagaaagcttaactgcatgtaatgcttggcgtttaaagtcgcgtagcatttggaacagttcaggtgttgcgcccttaggcggacgcgggcgaccaccataaagttgatcgccaactaatgggtgattcaaataagccatgtgcacacgaatttggtgagtacgacctgtttctaagcgtaaacgtaagcgcgtgtgagcacggaatttttctgcaacacggtagtgcgttatcgctggtttgcccatttcatgaacagccatatgagtccgctttgttgcatgacggccaattggtttttcaaccataccacctgcagtcatagtgccattacaaattgcttcgtattcacgggtgaagttttcgcgcttttgcaatgccgtcactaaatgtgtttgcgcgggaatagttttagcaaccaccattaaacctgtggtgtctttatctagacgatggacaataccggcacgtggcacattgataatgtcagggtaatgatgaagtaaagcatttaaaacagtaccatcagggttacctgcaccagggtgaacaactagccccatcggtttatttataactaatatatcatcgtcttcataaacgatgtttaatttgatattttgtgcctcatattctcgaggagcctcaatggttgtttctacactgaccatttcgccaccgagtaatttttcgcgaggcgtgttcaatatttcgccgtttaccgtgattttgtcatccaaaatccatgtttttatccgtgaacgcgaataatcagggaacaattgcgccaatacttggtctagacgtttaccgccaaggtctattggaacctcggcttggagagaaatttgctctgacattagtaactttacccaatttaccagtgcaagctgtgctcgactgggttagaatcgctttattaagcattgtataatacgtatagtttactcggttttcctctgttggcctagccgaagacatcgaaggtaataaataaaatgataaataaaatagggaaacgtgcgttcgccattgttttttcagttacagtacttggtttaggggcttgctcgtcagcaccagatcaagaagatatccaacgcgttcctaataaatctgcgcaagctttatatgaagatgcgaaacaaacattagattcaggcttatacgctcgagcaattgagttgttgagtgccattgactctcgctatccttttggtccgctatcaaagcaagtacaaatggacctagtgtatgctcactatcaagcaggtaatactgaacaagcacttgcaactattgaccgctttattcgcttgaacccaaaccacaaagatttagattacatgtactacatgcgtggcttagtgaacattaaagcagaccaaaatgctttccaagagtattttggcgtagaccgtgcggatagagatgcaaatcgtacccgtgttgctttcactgacttatcaacattattaaaacgctatcctaatagtgcttatgcgccagaagcaaaaaaacgtttagtgtggcttctcaacaaaatggcgcgctacgagttaaaagtggctgaatattactatgaacgcgaagcatatcttgctgccgctaaccgtggcaaatatgtagttgagcattactcacaaagcagctacttagatcaagctttagaaatcatggaaaaaagttacgacaaactcggcttacctgagctaagcgcgcatgctaaagcaacgcgtgaagcgaataaacgttaattcatcacatttacattaaaaaaggcgccataggcgccttttttaatgtttgcgatcgaatatacccaaaccacctcaaggtgcgagtttcagttggaattaaaagcgatttaggcaaggcattgattgcaagtaatagtggttctattgttaaaatcaataacgcagtataaatcgcttttaaaccaaccctttgggcgctcacaggcacttactctcatcgttgttacttcttaaaagggactaccattcttgcaaagtaacgccttgatattaagcacctgtgaaacgctgaattctgcatcttgaggtggcttgggtatactaattaaatcgcgtcttcatcttcttcggcggtacgaatacgtactacacgttccacatcagtgacaaagattttaccatcgccaattttacctgtttgcgatgttttaacgatcacttcaatcgctctatcaacatcttcatcgctaagtacaatatcaagtttaactttcggtaaaaaatcaaccatgtactcagcaccgcggtaaagctcagtgtgccccttttgacggccaaagcccttaacttcgctaaccgtcattcctgtgatacccacatctgacaacgcttcacgaacatcatcaagcttaaagggttttataattgcttctatttttttcatagtaaccagttagtttaaagaatatttgcctcgattttagacaatccatgtcagcatagcaaacaaactgaacaaataggtgcactataaacaaagcgtgatattattattaaactacttgtaagtgaggtacaagcaatgaaaaacaacaggaaacataaaggcttcacgcttttagaattaatgatagcagttgcgattgtcggcattgttgccacaattgcgttatgggacagctcagatacattagaaagaaatagagcagaaaattacttactcgacttgcagcggataattagttttgcccgggctaaagctgttagtacagatacccaagtaactgtatgtaagggctgggaaagccgcataaaaagggaccaagtgagtatctgccaccctctgtcaaaaaataacgcacaagaacaagttatctttatgtttagtaacgataaagaaagatttccacgtaatgtaattcaatggtacgaaccttattatggtgacgaggtctacaggatgcttcctccgcctagcaataaggatgtgatcacttataatggtggcgaacaaattattttcgataccagtggtagtatacttactcaagtgggaacttttgtatactgtccaaatcctaataataatgacaataataaagcccttctaataaacaaatcaggtagtgcgttttatcttggtgatacaaacctcaaatgtaattaaataagcacttgacatgattttaggtacatctatatttaaataaaatatatcaatagggagtcttcaaggatgaagacacatctcttttatcgtcgagtacttggcgcaacactcattgaggttttaatagtggtatcgatcatttcgatacttttaaaccttgcattgttcgatttaaaacctttcttagcgcaaaaccgtctagataatcaaatacatcttattaaacgcgcagtcgctattagccgcttaaatgcacaagcaaacaatgcgtatgtcacgttttgtgcattacacaataaccagtgtaactatcaattctggcataaaaaactcactgtctttatcgatcatggacagattggcgtgtttgatagtaatgacactaaaatagtacagtttgaggcaatcaataagcttgatatgctcacttataacaaacgcaatgcactaacctttttacctaatggaagactgatgggactcaataatgggacttttgtttattgtcctgaatacaaagaagcaagcctaagtgggcttgctatatcggtaaataatgttggcagggtgaaagtaatagatactgataaatgtcagcaataagctaattagcgaccccagcaaacatcagtagacgctgcagagcctccatgacgctgaataccacggtcgtctattattaatcttgtacattcagtatctttggcaggggggcctgcaattgcaatagctgatgcatagaaaactgcgcggccgacagtgttattaacttccagccttaaccggtaataaccattttccgtggtatcgtttaagccaagttgatcaaatgtggtagcgtattgacgattatccgcaaagtattgctcctgcttatttgctatatctaataaagcagtaacagcttcacttcttgctgcacgcttaacatattcgaaataattaggtagcgcaatacttgctataattcctaaaatagcaaccgtaatcattagttcaattaaggtaaaacctaactgcttatttttctttcttgatcttatatattttatacccatcaaatatttctcaaagactcgctatacatttgattataataggttcagttttttatgattgcaattaactttatttttatacctttctaaaaggtaaaaaaatgtagcaataaaaccataatcaaactttagaactgcagcgaataatcaaattaattaatttttactagtaagttagatcacgtttttcttgtttataaatatacatctgttgggttttaaaaccaaaaccaattggcactttatcactaacaagttttattttaccgttttcaattgttaacccagggcctaagatttcttgtactttgaatgggttttgagcgcccttaactccaggtccaatcgataaaaactggctttgttctctcactttttcgctagtattgtcatcacaaaaaccatcgctatttccatcgacacaactatcaccaacgccaaaataaagttgaggtgtgtctggaacatcgttcgaagttgtgaattttaaactgtcatagactttggtgccataatgtaaatgaaaagcataaagaccgccagaaccaccagtcaatgaacattggtttgcagtggctgtcgcaggagaaaagctagtaaaataagcaacaccaccaataaccgtacttgcagctagtgacttttctcccgaggccggcaagttatagtaccaacctttaaactccccgagcgttacttctagttctgtgaatttttcgacatcgtcaatagctttgccaaaaggatccgaatctacattcattaagtctgcttgagtgatcacgtcaggtacatcagcacctttaaatgattttgtcacggtattaatatcacggatcataaaaagttgatcgttggctgtcgaagaaagaggcttagcgcggtttccgctaccaattaatactgcgtcaaatggcgtatcaattcgcgttttaatcgttttcccttcaaaagtggtttctgatactttgctgaacattgtacgagcaatcattggtttatagaaaaaacgacgatcttgagtagacaaagcaccacctaggctcgctaatttaaaatgcgtccatggtttttgtgaatcattagggttatttgagggcatatcaacacgccatatatctccacctgtatccgctgcatacaatctatctacatagccatcataatctgaatcaagaatgctaatatcagaagcaatgctgtgctttcctaaaaagccattttcagttggagtcagagcccaaattttcttacctgtttgcgcatcaacaataaatataccccgccctttactatcattggagcgcgaaacattatctttatttgtgtcatatccgcccccaaaaactaatacagggcggtcctcataacctgctaaattaatgtaggttacgattggctttgaccaggtttgaccaagctctaaaaagtcaccagttccccctttgataggctcatcccacaataatttaggagaattaggatttgtaatatcaaggccataataataattaccgcctcgtcttaaaccaaagaatgcccaaacacgatcactatcattaacaacaccgtctccatttttatcatcaaagaaaacagagataggtccgtctacaccatagacttttgtgtctgcttgattatcacgtagcggcttaataattttatatagacttctaggtataaatgcccaactttcgcttaatacatcatttttatcttggaacatatgcaagtacccagcattagtgccaattaaaattcggatatcatcattaccgtaatcaatcgttacaggttttgaatgcaatggatcaccgaatatgtcattacgcgaatcactggtagatccatctttatcttcatcatctacatctacaccacgcgaccagaaagcaagatcatacaactcttgtctggttgccccactaacaccgaatgcttcagctgccttttcaacactaccgtagtaatctattgcattccaaccagaaaaatgacgtagtacattcccttttagatttgataatataacccgccttccctgtgcataaggaacgctatcttgaagtgccaaatatgcattcactccaccgagttctactgagctaccatctgctccttcgccacttggtaaccaaaatgttttcgcatttttatcaattaggccatcttcatttaaagcaggttttccatctttatcagtgattttgtcgccagacacttttaattttttcaaatttccgcgccaacgagccccagttttaggataaaacatcgcataataaatcgactctctgctacgtgtttggtcaacattgttactcgcaacagaaggagaggtaaaactatcgttcacttccctaatttgagttatcgtatttttaagtgcatcagaaagctgatcagcagtatttgcgtgaaggtatttccccccccctaactttgctgtctcagacagtaaacgcttaccgttttcgctcataccactaccaaatccgatagtataaacgcggcctgtctcatggatctcactagtcgaaggaaataagtcaactttaacattttccgagccatgaattatttgcgcaagcttgtggaggtatacacccgcgatacgatctgagtcgcctaaatagcggccaaaatacgattgatacagattactgatagtgccatcttgttcattatccgaacctgagctaggatcgccatcagtcatgtagataacatttacagaatggtcacagcgtttaacttcttctgtattatcaaagggagagatgtatgaataggtatagtaacgattccaccatggacctgaaaccgttttgttctcaattgaattatcacgtagcgcctcagccacctttgcaccgtagtaaaggcttttcccagtgatatacaaataagcttcccagagtgtttcggttaagggcgtccccccattagcaggtaatgtagcaatcgtttgctttagaaaagagttagaagaaccgatacccgcaagaacatatcccccatcaagtccattaaaacgcattaagccaaaatctatatcgtcatttccatcaattaaattagttatagcatcttgagcgatacctaaccggctatcagggcaaagaatatatcgcccatacgaaaaaccacagttaaaacctgagcttgttgagaatgccatactacctgaggtatcgaaaactatcagaacacggggtttctcatcgagctttacattatgattaacgtacagttcaatgtcttcagcatgggccattgagctgaaaataacagcactaccaagcaagattttgctgattaattttcctatattcattacaacccccactaaacaccaacgttcaaaaccaataacctaattgaaaaaagttatctcgaaagctcaagagtaagttaccttctaacaacacgatgactaaatacttgtagctgacgtaatgcaaataaatttaaaattgatacaagttaaattataactaattattttgaattaaaacataagtgctacaaataaattaattatttgcatcattttttcttagaatttcactaaaaataactagagctttggctattcactgaattcaatacatattttgcagtgtattgctttaactattaacaaaaataataaaaaagagccaactttaaaagaaaggtaagcgaaagggattgctttctacaaagcaaagtaacacattgaatcttaatgtaaatttatgtacttacaattataaaaaggacactgctttaaaactggtgcccttattacagctgcattatacaagtataaagccgcgactaaataatatgataaaaacattgcatatactattattgagttcggtcatacttctcttgtttatatatataagtttgttgaactttaaatccaagaacctcatcactcagtaatttaattttaccatttacggtatgtaagccagggcccaatacccctttggcaacaaacggatctttttggccaacaatcccggttccaatcaacataaactgactttcacctttatccgattcaccaaagaataattgcggagtatcaggtacatcattccctgtttgaaacttaagttcatcatatactttggttccataatgtaggtgaaaagcataaagaccaccagtaccgctacctagactacactggtcgacaacattggttgtcgagcctggtgcaaaacttgtaaagtaagcaacacctcctacaacggtactcgcagctaatgatttctcaccttgaagcggcaagttatagtaccaaccattaaagcgcgctaattcaacctcaagcttgacaaagccatcaacattatcaagtttcttagcaaaaggatctgaacttacattcattaaatctgattgtgtgatagtgttcgggactttactccctgtaaaagacttagtcacagtatttatatcgcggatcataaataactgatcattcaccgctgatgaaagcggatttgctctattcccgctgccaactaatacggcatcaaacggagtatcaacgcgagttactgtggatttaccatttacaacaacttcagatactttgctatatacacttctcgcaatagtcggtttataaaaaaagcgccggtcattgttagcccgagtgcccccgagactagcaagtttaaagtgcgtccagtttcgtgagttttgcgtaggcatgtccactcgccaaacatcaccacctgtatcagtggcatacaaacgatctatatacccgtcgtaatcagagtctaaaagagcaatatcagatgcgatactgtgtttaccttgaaaaccattttcagaaggagtcaatgcccagacttttttacctgtctcagcatcaacaatgtaaattcctcgccccttagagtcattagttcgtcgactattatctttattagtatcatagccagctccaaagataagcacagggcgatctttatatccagctaaattgatataggttacttgtgcttttgaccagctttgtgccaactctttgaaatcacctgagccaccgacaattggtccaccccacattatttgtgggcgattagggttagtaatatctaaagcgtaatactcatttccgccacgtcttaagccaaaaaatgcccaaaccctatctgttcgtgtatctacaacaccatttttgtttttatcgtcaaagaagatagaaataggtccatcaacaccatagacctttgtatttttatcattgtctcttaatggtttgataattttatataaacttcttggaataaacgcccaggtttcagttaaaacatcattttgatctttaaacatatgcagatagcctgcattcgtacctattaagatacgtacgtcattatttccataatcaatagtgacgggttttgaatgaagtggatcaccaaagacatcctcacgagtatccgttgttaggccatcattatcttcatcataaatatctacaccacgtgaccaaaatgctaaatcgtatatctcttgtctagtcgcgcctttggccccaaaagcttctgctgctttatcaacacttccatagtaggtaatagcattccaaccactgaaatgacgcaatatttcatcctttaagtttgataatattgctcgtctgccttgagcatatggtatgctatcttgtttagccaaataagcattaaccccaccaagtttaacatcattgccatctggtttttcgctgtcagctgaccagaatgtatgaacattaggggcaatttttccgctatcatctaaagcagaaaccccacctaaaccaactatcttatcaccagataccttaagcttttttaaattacctcgccaacgagcacttgtgctagggtaaaacatcgtattatacagtgcatcccgactacgagtttgatcagtattgttcgatgcaatagatggtgaagaaaaagccccaccctcctttcttaaagctgcgaatgaagtctcaagagcttttgataactcttctggattcgtagcaagaatatagcttccgccacccgctttggccgtttcatctaggattttttgtcctctctctgttaagccgttaccaaatccgattgtattaacaataccgcggtcatgtacctttgacgttttagggtacaaatctatatcgacatcgtctgtaccgtgaattatttttgcaagcggagctaaataactctgaccattatagtcgtctaaaaatgttgttgctggctcagagaaataatgttgatgcaatgactcaatatcagtattgctttcgttgtcatgttgaggcgagccatcacttatcatcatgatatgaacatcattgttacacctggcgttttttgtgaaggttgaatctaaaggagaaatatatttaacgccatcttctgcagtggtatcacgaaattcagccggaaataatgcaccaaactcaacattttgccctgtcaaatatagataagtctcccacagtgtttctgtaataggcgtagctccaattgcaccgttgtccaaaatgagttctttcaatttactatgttcagttcccaatttggctctgataaaaccaccatttccaaatggagaaaaacgaataaatccaaaatcaatatcaggattttcatcgattacttttatgagtgatgatttagcagctgcaattcggctatcaggacactcatacaagtaaccatcaactgggtgaaagcatttaagccctgtattggcagaatactgcatgctaccagaggtatcgagtacaaaaataacacgcgatttttcatcaagatctttatcataattaacataaagctcagtatcatcagcatttgcagcggttaaaaatccaagcatgcaaacatatataaatacacatttaaagttaacgaccttcattgcaattccctctctagccacccgtgtttaaacttgccatttcttgagcgacgcccgttttaacagttaatgtatgaatactttttttaccataggtaattgtggtattcacttcgaccatgttgcatgacacaccagaggtgaagttgtacttgcgtggacatggcaaatccaattcgccattatttaaattaatcattttattcgtggagtcaccgatcgcgcccaaatcgaagccaccctcaggtatttgctcaggctttttaaaaaaagcactatttcttccagcagcggcttgatttgcaatcaccttaagcactgtgcccataacttcattttcagcaacttctcgctcttgtaccgcggctgttattttggcatcaatactactgctattcattaaagttactgcaatccctgttactgcaacaaccataattagagcaaggatcaatactatgccctgttgctttttaggagggtttaaatgcgccacaaatttgctcctacattgtttaatctaatggtggttgtaaaaattgcgcgtcgatatttatcattgaatgtaagtgttctaccactagccccttctcctaactcataggtttgatttttaatttgtaagtcgccatctggcatcagagatctagcaagtaaaaatacttgtactgtcaaaattccacgcctattctcccaatcagtagccgtcatttgattaatacttttataggtatcaactcgactatcattagtggtgtctaagccaaaaacaaaccgcatattttcaactccctccataacagtttctgtatacataccgcttcctggggtcagtcgttttcgtttcagaacaggaataacaacacgttttttattgatataaatagtttctttagaaacataataaacattatggcggtagcgccacaccgttgcgttgacatttattgttgctgcattcacaggcccaagagtaaacaatgcaaattcttgctctgcaacaaaataataagaattattgcttgtgtacttaggctcattttgaaatccttctaaaaactttaattgtaatacatccgtatttgctgcagcgtcacgaatacagcccagcgcggaggagcctgcagcctgcactgcataaattgaacgaaaattagtactagaagctaggtcagggaaactaccgttatttaaaccagcagagcagtcaggacttggatttgcaactagactaagttgcgtattagcagcagaaaaggaatcctcgtaaaaagtgccccaaaaaccaacttgctcaatatcccgctgtagtatattgagggctaatctgccagtttcttgcagctcgccaatcatcatcgtgtctttagttgtggctttcatacttacataagtaaacattacaccacctaaaacaataccacctatgaataaggcaaccatcatttcaattaatgtaaaacctttatacttattcatcttacgaccttaaataaatatagctgtcaagaacgacaaggcgacgacggtcatttactgaaccacatccggtttttaagttttctgcgcttgctttaaactcttgtcgaccacgccaactaacaatcacttcaatattatactcacttggaaggccccctgagactgcagtggctttaatgcacacccttgcttcatccagagctccggtgttttcacgtgcctgaattgctcgcacccattgctgtttatcaagtgcagcgatttgctgtggagagcatgtagcctgataacagctagagactttacctaatgctgtttggctatgaaactgcccactatatagcgctgaaaaagtagccgtatcatttgctctcatgcggtggataatatcattccctaacgcaattgcagccgagcgctgcatagcatcaaaacttgcttgctttgctttcgcttgaagcgcgatagcacctaataaaccaaggctcaatataataaatgcaatgagcacctcgattaaggtaaagccctgttgatgagagttatttttcataatgaacgtggctaataaattgacataccttaagcataagaagcctaaaaataatagcaataggtgtatgtataaacggtcaatatgttagatgaacggtcagtgaaactctcgctcctacttacccaatgccgcttttaccgcttttaattcccgacgactaacagttaaaggctcttctagctggttcataattaaaatatgcccaccaggctgtcggctgtttaaactataaatatgttgcttatttacaagggtattacgatgtattcgcaataattgtaaagggaaagtacgctcgagttgtttaaggctctgttcaatgattgcttcgcccccttcgaatacgacacgagtatatttttgttccgcaatgcaacaaatcacattctcaatatttactctgcgcaatacaccaccgagctgataacttatgtagcttttagcagagtcacttaattgagttcgattaagcttgctaagttgcgataatgtttgattaagcgaagactcagaaactggttttactaaataaccatcagcacagagtcggaatgcctctagtgcgtgctcagggtgagctgtaagaaatacgatggcaggtggtatagttaactgttttaatgtcgcagcaacctccagcccattaagcttgggcatattaatatcgagtagcacgacatcaggctgtaactgtttacaatattcaattgcttgttcgccattacaggcatcaccaatcactgtataattactatgctctgacaataatcgtgaaatacgtgctcgagctagcggctcatcatcaacaattaatacttttatcatgctgttttctgccttggtaatacaagttttaccctaaatattccatcgcgatgagtggttgttattgttgcctttcgttgataaaacagtgataagcgttcacgaatattatcaagtgccataccattacccgacctttcattcatgatgttcttcactactgggttagtaataatgaatgtgtaagttttatcagactggtgcatttcgacatttatttcaccttgctctgcagtctcgatcccataaaatactgcattctcaataagaggttggagagtcaaacatgggatatcgatatcaggtagtttatcaagtaactgccagtttactgttagccgttctccgtaacgccatcgctctagtgctatatattgttggcatagtgttatttcatcggtaagtaaaatagctttaccacttttcatagcagcctgagagagtgcagctaatgcaagaatggcttgttctgccgccaccacatcatagtgggttagctcagcagcagtattcaaactattaaataggaaatgaggacgaatgcgggcttgaagcgcatctaatttggctttagccagagcttttgtttgctgctccttttgattatgcatcagcaaaaattgaacaaaaagcactgtaaccaaaaaaattatcagtagattactcacaataaagtgcgtcttagatgccatttcaaagatatctgcgaatacgttaagtactgcaaagctatacaagtatgtaaaaatcagtaaaacaattactaagatagataactgtactgcctgagataatttagcaagtacagaccgtgagagataaagacaagaaagactagataagaaaataaggtgcaaaaagaaactaaaaatggccagacgcaaccatacatcaccaaaacttaacggtgaaaacgccaataaaacagcaataacttgactgacgataagtatggcgagtacaccacgggattggaaaagagccgcaatcagcaagccgtgtgaatttggctgtttgctcatgggctcctcttttaactgttgactactatttgcttagattagcgtagctcaacaggaacggcaaatactatgttctcttcttcaccaggattttcaacaacttgattaccacctagttcttttaaacgagcaataacctgttgaactaaaacttctggcgcagatgccccagcagtcacacctacggcatttacattgttaaaccaatccgcttcaacattacttgcatcatcaattaaataagcagtggtgcccattttgtcagcaagctcacgtaaacgatttgagttagaactatttttagcccctactacaagcagtacatccactttatcagctaagtcacgaaccgcatcttgacggttttgcgtagcataacaaatgtcgtctttacgcgggccatcaatggccggaaacttagtacgtagtgcatcaatcacatctgccgtatcatcaacagataacgtggtctggctacagtaaaaaaggttttcaggatttttaacagataaaacggcaacatcttcaggggtttctactaagtaaataccgcccgcttcgttgtcgtactgacccatagtaccttcaacctcaggatggccatggtgaccaatcaatacacactcaatacctttacggctggctcgtgttacttccatatgtacttttgttaccagtgggcaggttgcatcgaacactttaaggtcgcgacgttttgcttcacttcgaacggcttgcgatacaccatgcgcactgaagataacaatactatcgtcaggaacctgatctagctcttcaacaaaaactgcaccgcgattttttaagccatcaacaacatatcgattgtgaaccacttcatgacgcacatagattggcttttcaaagatatcgagtgcgcgctccacaatactaattgcacggtcgacaccagcgcaaaaaccacgtggattcgctaataaaatatccattaacctgttacctctaaaatatcgacttcaaaggttaagcgctgccctgcaagtgggtgattaaagtcaattgtgaccgattcaccttgaacttcacgaacaagaccgggtaactcagtgccatcaggctgagtaaaggcaataatgttacctacttcagcaggggtatctgcaccaaacttactgcgatccacataataaatgttatctggatttggctggccaaatgcatcttcaggctctaatgcaaatgacttgctgtcaccggcggctaaacctagtaaacatttttcaaagttttctgtcaggctaccatcacccattcgcaattttgcaggtttattatgtaccttagttgagtcggctgcagagccatcttctaacttaattgagaaatgaaagatcacttcagagttttcaccaattacagcttggctcatgcttgttgctccttcggactttcgcctgtgaaggcatcaaataatagtaatgcggcaccgatacaaattgcgcaatcggcaatattgaaaacaggaaagtgccagttttcgtaatatacatgcaaaaaatcaataacatagccataagcaatgcggtcatacaaattgccaattgcaccggctaatactaacgcatatgcagaacataataccttgttcgtcgcgggtaagcgtttaagccaccatactaaaagtacactgatcgttaccgctattatgctaaaaaaccaacgctgccaaccacctgaatcacttaaaaagctaaatgccgcaccatagttatgtacgtatgtaaaattaaagaaaggcagaatatctatcgactctttgtaggccatggtattaacaacaagtgtttttgtcgcatggtctactactaaaagtagtagactcagccatagccaaactaagccactttttccggctagtttgctcacaaacaactcctacgcgaactgacgctgttcaccatcgccgtcaacattgctaacacaacgaccacagatttcagggtgcgctggctctgcaccaacatcatcacagtaatgccaacaacgctcacatttttcagcggttgttgcagcaactttaatgaataaaccatcaatttctgtagcttgggtaccttcaggttgtgttgtcacagtttcaacagttacgcccgaagttaatagcacaaagcgcaactcatcacctaacgccgctaatttcgaacttagctcttcacctgcgtaaatacttacgtttgcttgtaatgttgcaccaatgatttcttctttacgagccgcttctagtacacggtttacttcatcacgaacattaaggattgttaaccaatcatcgttgctgaacttaccttgtgaagaggcttgtaaaccatcataccaaactgaagtgaacacaaaattatcacgttcgcctggtaatgcttcccaaatttcttgtgcagtaaagcttaaaatcggtgccatccaacgcgtcattgcttcagcaatgtggtaaagcgcagtttgacatgaacgacgggcatggctatcgcttttcgctgtgtattgacgatctttgattacgtctaagtagaacgaaccaagttcaccagtacagaagttcattagcttttgcgttacaagcagcatttgatacttatcgtaagccgctaagatttcatcttgaagctcagctgcacggcccacaatccaacgatcaagctcaaccatgtcttcaatcgcaactttatcagtttttggatcaaaaccattaaggttcgcaagtaagtaacggcttgtgttacgaatacgacggtaacggtcagcagaacgtttaaagatttcatcagatacagtcatttctgctgtaaagtcagttgatgcaacccataaacgtaagatgtcagcacctagtttgttcatcacgttttgtggcgaaattacattgcctaatgatttagacattttgcggccgttttcatcaactgtgaaaccatgtgttaacacttgcttatatggcgcatgaccattgatagcaaccgaagtcatcattgacgacatgaaccaaccacggtgttgatctgagccttctaagtaaagatcagcaggaccggttaaatcttcacgtgcatcaaccacacatgcgtgagtcacacctgagtcaaaccatacatctaacgtatcttgtactttcatgtattgctcagcgtcatcgccaagtaaagttgctgggtctaagtcataccaagcttgaatacctgatttttcaaccaatttcgcagcttcttcgataagctcttgtgtattcgggtgaagcgcaccagtatctttatcaacgaataatgcaattggcacaccccatgtacgttgacgtgaaatacaccaatcaggacggccttcaaccatgtttgcaatgcggctctcgccccactcaggtaaccactcagtctttttgatttcgcttaatgaatcttgacgaaggttagcttggtccatacttacgaaccactgtggcgtagcacggaagataataggtgttttatgacgccagcaatgtgggtagctgtgcgtaagcgcatgatgatgcagtaacgcattgttttcagttaatacgtcaataacgctcgcattcgctttaaatacgtgctgacctgcaaacattggtgtatcaggtaaataaacaccgtttgcaccaacagggttagcaacttctaaaccataagcaagacctgccgcgaaatcctcttgaccgtgaccaggcgcagtatgaacaacaccagtaccagaatcagtcgttacgtgatcagcaacaattacaggcactgtgaagtcatagaacgggtgagcaacctgtaaattctcaagtgccacaccttttacataacctagtacatggtaatgtttgaagccataacggtccattgcatcttttactagctctgaacctaaaattaaacgctgctgtgcgccttcgtcatcaacttgaactagggcatattcaagcttttcgtgaactgctactgcacggttagctggtaatgtccaaggtgtagttgtccagataacagtactaactgcaccgctaccttcatggccttcggcaagttcaaacgcattgattactgcctcttgatcagcaaattcaaaacgcacatcgattgctggtgactgtttatcttggtattcaacctctgcttcagcaagtgctgagccacaatctgtacaccagtgaacaggcttagcacctttatgtaagtgaccatttttaatgatgcgaccaagtacgcgaatagcattcgcttcaaagtcaaagttcattgttaggtaaggcttgtcccaatcaccaaacacaccaagacgtttgaagtctgttttttgaccttcaacttgtttcttagcgtattcgcgacacttttcacggaactcagcagcagacactttcacacctggcttgcctaccttcttctcaaccattaactcaattggtaagccgtgacagtcccaaccaggcacataaggtgcatcaaagtcagacaaggtttttgacttaacaataatatctttaagaattttgtttaccgagtggcctaaatggatatcaccgtttgcatacggagggccgtcatgcaaaatgaaggtttttttaccttttttagcgctgcgaatttgaccataaagatcgtcttcataccatgtcttaagcatctttggttcacgttgagccaaattgccgcgcattggaaacgctgtttccggtaaattcaaagtatgtttgtagtcgctcattaatcctactttccgtatcggctacctaatttaaaccaaaacactgcttagcggcggtcacatcatctgcaatctgcgccgtcagttgtgttaatgtctcgaattttttctcatcgcgaagctttttaattagctccacgtgcataaattgtccataaatgtcttgcgcaaagtcgaacagatgaacctctaacaaagcgcgtgttccattaaatgtgggtttgttgccaatatttgcaaccccaaataattctttttcgccaacttttgctcgtaccgcgaacaccccatttacagggcatacttggcgttttaatgctatattggccgttctgaaccctaattcacgaccttttgcccagccatgaataacacgtccagaaattgcataaccatgacctaacatggtttttgcgtcttctaattgccctgcagcaagtgcctggcgaataagagtactgctcactctatcattgagcctgcgaaaactcgcagtacttttcacatccatgtttaactcagcacccattgctttaagcaacgcaaaatcaccacggcgccgctttccaaagcaaaagtcatcgcctacagtcagagcttttacacctaacttatcaaccaatacttggcttacaaactgctctgcttccatattggcaaattgttgattgaagctaatgcaaatcactcgctccactcccagtttagcaagtaagctaagcttatcacgtagtcgagttaaacgcgctggagcattatctttagcaaaaaattcttgtggctgaggctcaaataacatcacggtacttggcaattgatgcttttctgcgtcttgcagcaagcctttaatcacttctgcatgacctaagtgcacaccatcaaaattaccaatggtcaacacacagccataatgctgcgcgcgaatattgtgaatacctctaattaactccatgccacctttttgcctttatcagcgagcccaaaacattgatatcgggcttgaagcgccgattataatcttttttttagtttgattcagtagttgcaacactttttatcgtatttagtcgcacccctaaaatgaataaggctgcaaaatatacaaaaaccgccaacactaataacccgcccaacaacaacacttgctcagtaaagtgccaagcttgccatataaattgctggcctacgtaccacacagacgcagccattaataaacttgaaaacaaacacttaaaggtaaaaccaaggctcatcgcagaaaactgatagaccccttctttacgtaattgatgatacaacaaataagcattacaactagccgacattgatgtggccaaagccagacctaaataaccaataaatggtgccaacataatgttaaacaccatgtttaaaaccagagttttaataccaattttaacgggggtttttgtatcttgacgcgaataaaagcctggtgctaacactttgattagcataaaactaactaatcccactgaataagccatcacaccgtagctcaccgcttggacatgatcaatttcaccgtcctgaaacgcaccgtggtcaaataaaaccgtaataataagcgggctaattaccattaaaccaaacatggcaggcaagcctaagaaaataacaaaccttaccccccaatcaagggtcagctgaaaatcttttgtactttttgtgctatgtaattttgacaatgcaggcaatatgaccgttgcgataccaataccaaataagcctagaggaaactcaatcaatcggtctgagtaataaagccaagcgatagagcctgtcattaacatagaggcaatcatggtatcgagtaacaagtttatttggcttatcgaaacgccaaacaaggcaggtagcatgagctttctaacttttttgacgttttcatcttgccacccccatttagggcggctcagcatgcgggcacgatacaaaaacggcaactggaacagtaactgaactagaccacccacaaatacgccgatggcaagcgcatacgcccccaccgaaaacttatcatgtagaaaaatagcgcaagtaataattgatacgtttaaaagtacgggtgtaaaagcggcaacggcaaagcgattatatacgttcataaccgcaccgctcagggctaccagactaacaaaaaataaatacgggaaagtcagttttaacagcgcactagcaagaacgaacttttcggcattttcgccgccttgccaccaatcaataaaccagccagtaccaaataatgctgcaatgacaggcgaggcaaccacaccaaatagagtaaccgctaataaaatggtacccaaagtaccggcagcttgagcaacaaacaacctgaccttatcatcgccttgctgttcttttatctcagatagaacaggtacaaatgcttgtgcaaaagcgccttctgcaaataagcgacgtaaaaaattaggaattcgattggcaaacaaaaacacatccgctgcggcacttgcacccagtaaattagccactacagcatctcgcaccaatcctaaaatacgcgaaatcattgtcatagcactgactatcattccggaacgaaataatccttttgccaccttaaacccgttatcaaaaatcttataagatgggcgattatgcctaaaatatctttaaagcactaggctcgaacccgaccctttgttacaatagcgatattaactgctaaagcggcaaattgatgttcgttataaggagcagtttttcttgagatgtcaaaatttcgttgacattcatgataaaaacaggcatattccacggcctttaaattaagcttattttaagattgttaggagcaaaccttggctaacatcaagtctgcaaaaaaacgcgctattacgagcgaaaaaaatcgtcaacataacgcaagccgtcgttcaatgatgcgcacttacttcaaaaaagtagttgctgcaattgaagcgggcgacaaagaagctgcacaagcggcattcgctgttgcaacacctatcctagaccgttacgcaactaaaggtctaatccacaagaacaaagcagctcgtcataagagccgtttagcagctaaaatcaaagcgctataatttgtttttgatgaatataaaaaaaccggcttttgccggtttttttttatcttaatgtttttcagataactgctatgcaatctctaaatcggggtaaaactttttcagcattgccgcgatcttctttggggtaaaaggctttacaacgaaacctttggcgcccttttcaatcgcttctttaacattttccactgttgaatgtgcagacaccataacaacatttgcttcaggtgaaatatcatttatctgtgagatgatttccttaccgtcaccatcaggtagttcaatatctaaaaagataatattaaactccttctctttacacgcgcttaaacactgcgctgctgtggatgcctctcgaacattatctatacctaggtgcataagcgtttggtttaaaaagctacgcacggtgccaacatcgtccacgataagaattgaaagctgcgtgtccatactattcctctaatctttaaagataacacttattgctaatacaatattaacttaaataaataatttacgctttgaatttgactattatatcaaaaacttcgttataatctcattatagagagctatatataaaaggccagataagctttatgtctaataaaataaaaaaacaatctttgcttggtaaaacacctgaacgaaaaaaaccaacacaagcaaagcgacaaagaccagtaaaccaacaacaagcacgcgcacaagtcgcgcaacaaagcattcctgaaatcgagcttaaaaaaagtaaagcacgttggtatacactcgcagcggttgtattaattctactaattacaccaaaacctattttaatcacctatgaaaagcttggtatggtatctcagagtgtgttctggccaggcatttttggctatggagcaaacttatttgattcaaccctcagtccccgtgcagacctaagtcgtaacgttatttatctttgccaagataagcgtaaaccagacacttgccagaagtaccgtgtgacagataaaagtggtttcttcgcagcaatgaaaaaactaacaatagattaaaaaaactaatctgaaaattaaaaattacttggttgaaagctgtgtaaaagatcaccataatggcgctcctttttcaacacagatatgaattgatacgaccatggtaaacgagctagattggcttttaaacttaacgctacttgccctaggattaggtgcattttttattaaccagctgacattactacgttttgcagcgatcagcgcgtgtagtttattgtttctatcatttagcttagatctaatgtcgtcaagtgttatctcgaatatgagcttagtgttgatcaatacattttatttattcaaggtctatacatttggccaactgaatatcaatcaaggttaatcttcccctaagataaattgatagaataggctatcccatctatcatcttttctgcccaagcagcattctgtttgggcttttttttgcttacaagatgactgaactgagataccatattagtcgtatataaataatttggaggtgcactgtgtcatttaacgacttcgacttatttctttcgtcaatggaagacgtaaaacctcttaagcatgacactgttcaatttgattccacgaaacaaggcccttcactagcgcaacaagaaaaacgtaaagcagctgagtgtgatttagcaattgatgaaaactatttacgcagtgagtttgttgagctgttagatccccatgccatattggcatttaaaaaagatggtgtacaaggccaagtatataaaaatctgcgtttagctaaatatcaacttgatgccacgcttgatttgcatggtcagccccttcaacgagctcgcagcacgcttttaaattttattgatgactgccacaaacgaaatattcgtgtcgtgcttatacgccacggcattggtatcaaaaataaatcacaaccaggtattttaaaaagctataccaataagtggctgcaagaaattccagcagttttagcgtttcatagtgcccttaagcatcatggtggtagcggtgcaacgtatgtgatgattaaaaagtcagacgagaagaaacacgagaatagagaaatccattcaaaaagaagttaatagaaaaagcgattgaagtgcagcattaaaacatgctgcacatacttactgagattggttggttatgattggctaacttcagtggcctgagctggctgctccgatgcattagcttgattaaaccatgctgaaacaccaagaacgataactgacactacgactagactaaatttagctccaccttgattagatttcataacgcctctttttattgttgtttttttattgttgttttttattgttgttttttattgttgtttttttattgagcaacaacagaataacaaagttacagatgttaacaaggtgtttattaaactaatttgtaatttgtcaataaccttttgttctatcaatctgattcattaggttttcaccttcgattagtctctttacattatctgaaatttgcaaagtaactgactctatatctgacaatgcagcacagtgtggggttaaggtcactttgtcatgagaccaataggggtgtgttttaggcaaaggctcttcgctaagcacatctagcgtagcgccacgtaattgctcattatcaagtgcctcgagtaaatcttcatcaacgacatgtttgcctctggcaacattaattagtaccgtatggctttgcagtttgctaatgagtgatttatttataatgccttgagtgtgctgactaagtggtagtaagcaaacgagataatcaatttgaccaagcatgtcatctaatccatgctgtgtgtaatacgtgtccacctcagaatcatgtttttcactattagaccaagcgctcactttaaagccatttgcaagtaagcgcttagcacaagctttgcctagttcaccataacctaaaatacccacatgttgctgtgaatacgctcgctttggcttccaactgccggctgattgttttaaataatactctttaagcctaagcttgtgtgccaatacatgggtcaacacatactctgccatatcattagccaggttatcatcaacaattctaacaacgggaacatgtgcagctatcttcgttaaatcaatgctatcaacacccgcaccaaaagaagaaacggcttttaaatttactaattttggccataaatcagcgggcgcattccaagcaagcacaaattcaaccgcttcgtaatcagtacactctgaccaaagctgtaccttgacctctggtaataaagcttgcagcttagtaattaattggctgcaatctcggcctgttatagccacaagtaaaatcattgtcttctccattttgcctcgtactcaaagcgctcattaaaaagtcacacaactgcaacctaactgtcacagcaaactcttaacctaatttcatcgctaaatgcgcttaagattgagatgtgtatgatcagtgttgataaagtaatagaagcaaatttaccacagttagaaaattcaccaaaagtaaaaggcttagtaaaaaaaggcctgggttatttattacatgagcaagagtttgttgcctttggtgatgcatacccacacttacaaggacttgagtttgtagagcaggtgctcgaagagctagactttgacacacgctacaagccaaagcaaatggagcatatacctagtgaaggcaatattattattgtggcaaaccacccaattggttcactcgatgcattagcgctaataaaagtcttatcaactgtgcgccctgacttaaaggttgttgcaaaccgcatgctaatgtctatcaccccaatgcactcgttgctacttcccgttgataacctctctggtacgagtaaaaagaaagaacttgctaatatccaacagcacttaaaatcagacggtgcgttattaattttccctgcaggtgaggtatcgcgcttaagtccaacgggaattaaagactgtaaatggaacagtggttttttacgtatggcaaaaaaagctaacgcgcctattttacctatttacatcaaagcgaaaaacagcccgctattttacggcacctcaatgatttataaaccattagccagtttgttattggtcaaagagatgtttaaacaacgacaaaaatcattagagtttgaaattggtgcatctatcccacctgagtcatatttaatcgagaatttaaaagataaagaaatagctcagctgataagaaagcaactgtatcgacttattactaaaaaacctctgccgttaaaaacacaaacccccatagccagcccagaagcgactaaagaccttaaaaaagccattgaggagtgtgaattattaggtgaaacctctgatggaatgaaaatttacttatatcaatactgtggcagctcgccgatttttcgtgagctaggccgactgcgtgaaattgcgtttcgcgcagtcggagaaggcagtggtaaacgccgagatatagataaatacgacatggattatcaacaccttgtactatgggatgccaaacaacttgaactagttggcgcatatcgacttgcctgcgcacaagacatcatagaaaaacatggccgcaaaggtttatataccgatagcctatttagctacagcgatgatatagcaccgtatttagaaaaaggtatagagcttggtcgaagcttcgtgcaacccaaatactggggcagaaagagcctagattatttgtggtttggtatcggcgcattcgttaaccgttacccgcaataccgctatttgtttggcgcggttagtgtgtcaaatgcactacccgagcaagctaaatcgctactcgttcattattaccaacattattatggtgctaaacaagtgttagcaatccccaataatgaatatcgccataccgaatcacaaaaagcacaatgtgctcagttattttctggtaatgatattaaagaagactttgttgaacttaaacatgtgcttgccaatatcggcgcacaggtccctaccttattcaaacaatacacggagctttgcgagccaggcggcgtacagtttttaagttttagcatcgaccctgagtttaataattgcattgatggattagtacttgtcgacttagataaagtaaaagccagtaaagccaaaaggtatttgggacagacacgctaatagtcattaaaaaataagtcggcatgttcgccgactttttcttttttaactaaatatatttctaagcgcagctaaatatatttgctcaatagtttttaagtctactatgggtacgtgttcattaacttgatgaatggtatggtttcgcacgccacattcaatcacttgcgtgtgctcattggcaaaaaaccgaccatcggatgtgccaccacttgtactaagcattggaaagctgccagttacttcgtgcacagcttgttcaagctgctgcaacaagcaattacttgcttgatgcagggtataaaatgattcacacggacgctcccaaacaagcgttagctgcgatgctaaatcagccaatgcaaattgaatttcttctttaacatctttgctcttatagccatgactataacgcacgttaaaggtgagctcacactgagcaggaacaaggttatcgaccacattggcaatattaattccggttacttgcagtgttgttgccgagctagcttcatctttgtgccagctaattgccattaagcgctttacaacctcggcacttaaatgtgctgcgtttatggtgttttctggataggcaacatgccctgctttaccttgaatagataatcgtgcagacagcgcaccccgcctgccattttttatggtatcacccacatgctgatggcttgttggctcaccaactaggcaaccatcaagcacaataccttgtttggcaagacgttcagcaatcagtaaagagccgtattcagcctcgccctcttcatctgaggtaattaaccagtaaaatgtgccgcgtttattgctattttgcgctaaaaaccgtttggttgcgcaaagcatagcggcaacgccgcctttcatatctgctgcgccacggccatagacactgccatccactatctcaccactaaatggatctactcgccaatcaccttgcgctgcaggtaccacatcaatatgacctgaaaaagcaacggtagggccttcgccaaaagtgattttagcaattaaattagtaacatgattaaaactaaatacctcacaatcaaagcctagctggcttaagttactttcgagccagtcaattgccccagcttgctcgggcgttaccgatttaaatcggatcaaggtttgtaatgtttctaccacctcagattgctctgataggtgcgttgctaactctgcatttgatatcaaactcataataaccctagttatttagaaagcttgggttattacaacgagagtttatgaccgcaatatgaaacttaaattaatgatttccttcttcaatgagggtttcttgggtcactttagcaatatctttgtcttctttggttaattgtgttcgttgccagcgacctgctgcgaaccataaataagtaatagttgccacaagtacattagtaatagcaaacgaataccatatgccctgtggtcccagtgaggtatgtttagacaaaatatacgctgcaggaaattgaataacacattgcgaaagcagtgacacaatcatcgcattgagcatgtttcctgaagccctaaatgcagcaacaacacaaagctgcacgcctattccgccccaagttaagcacatgacgcgaatgaactcagcgccaccagcaataacagactcatcatcaggaatgaaaaaagccaccaagtattcagcaaatacataagctaaaatgcccactaatgtcaggcctaacagcccccaaagcgcggctaaacgtgttatttgtgctgcacgctgtgggtttcctgctcccatgttttgacctaccaaggtagaaacggccattgaaagacctattgccgggatcatcaccatttgcaaaatattagaaccaacaccataagaggcaatggtgtgcgtaccaaagctggcgaccaaaaacgacataataattaacccaaaggctcttgctgagagttcaaccgagccaggagcccctaaaaagaacgcttgtttcatatattgccaatctggtttgaagctagagagtttaagttgaatgccgtgacggcctcgcaaaaatacccaaacgccaattaatgccgctaaactttgcgtaatgagagtggctaatgccgcccccattacgccaaaaccagagaaatcaccaaatccaaaaatcagtaaagggtcgagcacaaaattgagtaaaacagtaccgctaacaatatacagtggcaccttagtttgcccgatgccacgcattaaagcctgaaacatggcataaataaacacaaacacaacaccaatgaaagacacatgcataaacttaagcgcatcaccaaacacttgctcttcaacgcctaataaagtcaaaaagtaaggcgataacacataacctattaaaccaagtatggttgcggtaattgtcaccattaacatggtttgagcagcaacatgatttaccttatcttgctggccagctcccatatattgagcagataaaatggctcccgccattgccaacccagagccaatagcaatcactaaaaaagtaaccggcatactgacagaaacggcagctacttgctctgcccccaagcgccctacccaaaaagcatcggttaactgataagcagactgcaaaatattaattaagatgatcgggatacctaatttaagtaacgcttttgaaatcgagccatgaagaaataaatgctggggagcagccatgaaacacacctaataaactaataacatcgttagtttaacagccgcaactgaatataaagtcaatgagagtcaatctttttttcgctgtacccgtttaaaaacttaatctaaatcaataaatggcttcacttagttcaaacatttttgaaactttgatctagaacaggttttgtcccctccaacttagtaataatagcctcaaccaaataagacaagtagttcgcggagaacaacatgaaaaccaaattaagcattgcattacttacttcactattagcactctctcctgttgcaaacgcaaacttaagcgtgaacgtgggtgctattaacgtaaaccctgacaacgatagctcaaaaatcaatgaggctccggcactaggcttacgcgcagatgatgacacgcaattaggtattactatagattatgcactagacgataactgggtgcttgagttagttgctgcaacgccatttagtcatgatgttcaaggtgctggtggcttagctggtaataagattgctaaaattaaacacttaccaccaactttcttagcacaatatcacttttttgatgcaacctataaattccgtccatttgtaggtgtaggcgtaaactatacagttttctttgatgaagagccttcagctgcactaaaagcaacattaggtactgacgacgtagaagtcaaactagacgactcatttggctttgcagctcaagctggtttcaactacatgatgagtgaaaactggggtctacatggcatggtttcacttattgatatcgatacagatgcaactgtatatgctggcggctcaaaagcattaacatcaacagtagaaattgaccctgtcgttgctatgtttggtattaaatacaaattctaactttcattttgtgaaagcccatacgcacaaaaaggccattaaatggccttttttatttgttcccactctagaaaaacttgcaacacgaacttgattcccgctcaagttcaatcaactaatcaatttagactacactataaaaataacccatttctttttattggtttttattttttgtttatttaaccgttacttattttactgtttttcattgcaatatctgaattttcagagccaaagacgtgttgttcctatttgctcgcgattataaaatggttgtaataattttgacctatctaaaataaattaggtggcagctcgaggtgttaattgaaagtaattgtcaattcgttagtgttgattctttgcacagctctaatctcgtgcaaagtaaaagatcctagtgaagataaaccgcaacaacaaaagcaagatacaattagtgatcgtgaagcgctaattgcgggcaccgctgacatcgtatttactattaccaatgaaaatcaaacacctcttaacaatgtgagcgttgacgttgcaggtcaagagtacctatccgatgaaaatggacgtgtttctattagcaacctctcttttggtaatcactctgtttttattgcacaatcaggttatttcccaaaggcaggtattttagtaaaccaacctaactctgtaacctcacacatccaattagaaacacaatcagcaaattcaaaaagcttgttatttgctggtgatacaatgtttggtcgacgcttcctagaccccaacttagagacaatgggtacatctgtacctaatgttaacactgcgctcattcgtcctgactcagcacgcgaagatagtatcgccataaccacagaagttgcagcgctctttaaagctgctgacttttcatcggttaatcttgagtcacctattacgacaatgccaacaacagttcatccgactaaagaattcagctttttctctttgcctgaatcactgcaaagccttactgaaattggtattgattatgttggccttggtaataatcacatctatgactatttgcagaatggtcttgaagatacactccttgaagtgtcaaatgcagggttccttaatagcggcgcgggtttaagtgaaactgacgcttttaaaactgtcgagcataaccttgataatgttaatttagtgctctttgctgcaacttcaattaccggaaaagaacatcaatatacctacgttgctgacaccaataaaggtggggctgctgatttaacaaattcagcggcagtcaaagctgcacttgaacagttagatcctactgactttgtcattgcacaaatgcatggtggtgatgaatactcgtatactccatcaccttatataggtagccgatttgaagttctttcttcacaaaatactgatctactaattggtcatcacccacacattgcccaaggctttgctgtatttaatgaaataccagccatattgggcttgggtaactttgtatttgaccaacccagacttgataccttattaggccttgcagttatgctggaccttgatacgcaaagccaaaaaatcactcgtggttttgcttatcctatttatttagaagactataaacctcgattcaccactggttttttaagtcactatttattgagaagaatagccgaactttctgatgacaatattacgcttgttccccgagaaagctacgctgaaatatattttgctgcaaatcaagcaacaaaaaatactcagcaagtgactatcaacattgatgccaacactgacatcatagacttgagacaatattcaccatcatctgctgcttacgtttcatccatagacgttaatagtggttctttagatacgcttttagtgggccgagatattatggtctttggcgattttgaagattgggataacgacgcagacacctttgaagttagtcgatgggatcatagcagtgaaagtgtgttgccttgcactgataagccattcaatggtttgcaagctctgtgctcaacccgtgataagtttgacaacactccttctattattccatttagacacactatgcgggttatggagttaaccgacgaaacaggtgcactagagttaagtaaagacttttcgttactgacctatttgcaatctgaaaatggtggtcagcttgaggccttgcttacttatacaacagaaattgatgaccttacctttgcagaaaaccaaattcccgttagcgaaggaggtaatcaaccatggcatgtttttagccatgactttagtttaccttctgataagttaacacttgggcctaaaaaattaccacctcgtggcgtaaaactacaatttaggcactatccacccaatacaggagaagcgatcacgcgtctagatgatgtcgcaatgatcagctggcaacaaagtatcaacctagaaaacggacaatggaagaccgataaaatgcacggttttgactttttaaaagtcaattcaagtagtgaagtgagcttaacgctgacattcactgtacttgattaaggaggaattgtggttgtattacaacaattgttgcgattaacgcagcaaagagccttttggtttactgtttgcttatttgcaattgtgattatcagtaacctgctgaatttatttcaagcaagtaatgcctttttatataaaaaaatagaatctctcagtagcactcagcaaacaaatgtagtgcttatcaccagtcaaaaccttagtgctaaccattcacaattagtcacccagcttacagagtaccagccaaaagcaatcattgttttagcagatgaacctttagcacctgtagacaatgagcgtgttttctacccttattcgcaaagtaagtactgtgtgccaaacgtagagatttgggcaacatatcaaatgcgtattccagcagcgactaaccttgagtgtgaaagtgtgtggcaagctgtttttggttataagcacgaaaaatcaagacttattaactttaaattggcagtttctgcgctacctaaatttacagctaagcgagttcttggctttgatgtgatgagtgagcaactcgaaaataaagtgattattgtcggtcagcaatcagctgaatttaatgtgctgatacatgctcctaaattagaagggcttaatgaccccttacttctttttgcttatatcgctgatagtctagaaaaaaacagcacaataaatgagcttaattttgttatctcgatagtacttgcgctgatactggtatttgtcctactgtttttctttcaaaaaatgtcgattagttattcatttctagtcgcactaagcataactatcatttggtgttgcgctggctattttttagtgaactttgcaaagttatttatccctatcggccaatacatcattctgacctttgtcactttattttgggttgtggtggcgaggaagatttctgaagataaagagcttacaactgatgtaaataacattcagcaaatgatgatgggccgttatattccgcaaagctttatagagcacccttctccatgggatcccataatacaattaattagccaacagttagatctagaaaaatcaatttttttagctcgaaaagaagacgaccatcgcgtcgttgaaattcgggctatcaactgccaacttgatgatattcaagaaatgagacgtgactatcagcgaacgccttatagtaatgcgttaaagtcattgggtatcgtaaagatcaaccgtccattttttaagcaaatcattgacggtgaaatcgagtttatcgcaccactggtatacgccggagatgtccgtggcttttgggctttatcaatcattcctaatcataactttaatcagcaagcctttgagcaaaacgttaataaatttgcagctcaggttgctgaactactattccattaccatattttcaaaacaacacaggctaaaaaccgtaccttattaaacaggctactcacctttaagctgcacgagcctattagccaaaaggtaaaaagctccctgaacgaaatggagcaaaagcttactaccttagagatggtttttaaccacacaagcccagcaactgtgctttttaatctgtttggtcaagttattcaaaccaatgcatctttagagcgttttgctaagcagcatcaaatagctatttttgaaaccactgcgcttgatttactgtgtaaaagttgtgagcttgatattgaaattgcaaagggtaaattacgttacattactcttaataaagcgaccgttgagcttcctgctaaacttggtgcacatcattacactctaattattagagcgcttcattcagataactcgcaaactgcatcaggtgcaccttttcaagtatctggaattttatttgagtttatagcaaatactcctgaaataacttcggaggctaaactttaatggatttcgttttagcgctttttcctgcaggtagtggactgggccaatcagtaataacaactgtttgggtcggcacggctgtagtatgcctactgaatttgcgctttggttttccactcacaggccttgttgtaccaggttacattgtgccacttttgataataagccccacctctgccgcggtgattattatagaagcaattgttgtgtttggggttatgcgctttagtgcaaattacttgatggagcgttttggctacagtgaaatgtttggcagagaccgtttttttgccatcatcctaattagtattttagttcgtgtttgtatggataccctgttttggccaattattgcagatcagttgagccaatgggatataactttcgattatgcatcacaactttattctttgggtcttatcatcatcgcactaactgccaatgtaatgtggaatggtggctttaagtacggcctgaaagtaacttttattcagttgttcattacctatattttagtacgatttgtactcatgccatttaccaattttagtatcgctaacttaggtattatgtatgaagctgttgccgcatcaatcattgcagcgccaaaagcctatattattttagttattaccgcttttttagcttccagagcaaatttaaaatatggttgggagttcaatggtatcatgctaccagccctattagctttgcagcttacccaaccaagtaagattttaacctcattcattgaaacagctgttatcttagccgttggcggctctctcattcatttcactcgcctaaaacatgcacatatcgaaggtgctagattattgatgttattttttactataggctttatctttaagcttattttaaactatatcgtcgtttggttttttccaacggtaaaagtaaccgacacttttgcatttggttacatgctggccaccttacttgccctaaagatctatcaaaaaaatgcgttaggccttgtgctaagagccacttttcaaacatctgttgtaggtggaagccttgctattattgttggctttttagtaatgcttatcccttctttactaacaaaacaaaatattgaccctgaagcagaacagttgcaagtcatcacgctcaatcagcaagtgagtcaatacaaaagctacttatatactactcgttctaataaggtaaccgtaagtagctacaaagccagtcaggcagtctctgatttcaaatatgcggtttatcagttaaatgaagcgattaaaagtaagcaaaaaataggtcacctaagcgctttatttaactctatcgggtttaaactcgttagtgatgaaaactacgtatacctaatagatattgttgagaatcagcaacgcggtttatttgtgattaacaaaacgccacaaacgccactcataatcacagttccgtatcctatcactgaaaatcttgctagcgactcagcagcccttatttttcagcatctaaaaagtaaagctctagtgtttggggcaacaaaaacgcctcaaataacattagcgaaggaaaaccagcaaagccctttttaccaagcattcattaacgcattagaggcgcaagaattattgcaagttcgtgaatctaaccgctacaccgcagctttactaaaaagcacgcctgctgaagttaaaagccagtattggatctttaatcgacttccggcctctataagccaacgcgaaatgcatgagtttatcggcagtgaagcaacttattttggtaaggcaacagcgagtagcttgccttcgagtagttttaaagggtctatgctagaagtctttcttaatagagataactacaccaacatattggcgtatatataccgtgaaaattaccgttatagcaatttaaaactcaacataatcaatgaagaaatggtcaaaattgtcgaagatttctcatcgtatataagtagtaaaggcagtctcaattatcaaccactgacacacagccaagttgcgctttgggaatttgaagtactaacaccactatatagattgatacagcaaatcggcaatgcctcactgaacgaggatattttaaatcacctgaagcagataaatggcactgcagagttacttaactatcagttacaactagtacagaataatagtggccgatatttactattaagtcccttacaaaataatgaagcaatggatcttggccaaggcctgtatgcgtttacgcttagcaaacatgaagcaataagtttaagcgtgccaaggcctgtttttgaaggaaatactcttagttttgccagccaactttttacgacttcaaatgccgctaacttattaattgcaggagcacacccatatgctcacccgaaggctaatgtacttgctgcagacaacgtcgattcattattcaatatcgtccatcaaagctattcgcgttttaaagcacaacaaccgagcttaaatatccaaattcgcagccatagtgctccgtcgtggatccgccctaatgcaattgcattttcaaacactcaggtaagtgacgttgctgcccctttaatggaaaaactaaccaaagacttaagcattttaggtgttaattaccaagtagtaacgggccaaaaagccactcggggtcttgagattggtagctcaccgcaatatggctatcaacagtttaatgcaaacagcgagctcgctactttatggatagcctcagactttaaagaacagttttcaatggatcaagatagtttgcttatgcgccttcttgcgatttctacttatccaacagtcaccactattaacctagccactttatctccttctaactggttaacgttacctgacagcgataaacaaattatctttagaaaaattaatcaatataccgccgataagcaaattgctgtactgaaaacaatatgttcagagcttaatgagtgcgtattacaaaccataaaattagaaaatttagataaattcgcactgatgatcaagcagcacaatagtctagtcgctatatataatccggcgagcaatcaattgattgatgtggatgttttcaacaaaatgatggggggaggctttgatgtatctaattaaacgcttcttcgctatcttaattcttatcattgtattgttaacagccttatttgcttggaatagctttttaatttggctagattctgctgagccagttaacccccaaaccagtaaagaaactcgctcaaaagtacagtggcttagtagcacaaagccactgacttatacattttcaaatcagcgaacacactcacttaggatcttatcaaacgccgtatttgatcaatctgtcactcttgaacagccggtaaattacgccatcaaatacactctttataatgacaagaaagaggtgattgtagataaagtttatcaccacgcttcaaagttagttaataacagtcaagatcaacaaattaagcaaatcattgaaaataagcagtctttgaatgtggcttctgggcaatcattttacctacctattaaacattacccacaagcgaaaagcttagcacttacacttattcctgaagaaaagacaattcaaggagtggtagttcgagtgcatgccaaaacacctgaccaaaacgttgatccactcaatagttggctaaaacgccccgtcgatagacgtaaacgtgcaactgattacctcacgatgggtgaaaataccttaacaaatactgaaataacgaatgcaatggcgttttggtggcaaaaaatagcgccacaaggtattcctggaatcgactttaaatcagatattctttatgaaagcttaccgtataatgtactaacctatgattttagtcagcaacagcatagtcttgctgcttactataccaaacatggtttatgcgccagtatcacattagacaagagtgatcgtttaaatttcactgttagtaatgaccaagagactccgtcattaatctggtatgacaaacttcagtttgaagcaccaaaagttataaattacacgctaacagataaagaaaacacatatcaaactcagcctcttgagccgggattaattacaatttgcagtgagcaagagctgctaacccaatggcgaactgaatctggtaccgctattttaacaagttatgctggtagttacctgattaatgcgcaagagcacgtagagttcgatgttgtgccattaagccatttgaaccttgagctcagggctctcgaaacgagtcaattagatatttctctatacgatgaaaaccaaatccaaatagatcgttactctattacgatcaaaggtgaaatttctggctttgatcgattaatagcagacaacactcaaagacaagcagtaggtatgctgaccccctactaccttcgtactgggaaagagacaaaatatgtaaaaattacggctaataacgatgtgtatgtgcgattgaaatcaagactcgcgagttttcattatcaacgccgaattgcacaccagccaattcttactgagtctactaatggcttttatgatattgcagcatggtatgaacaaaaagcacgtaatcactatgacttatcgcaacgcgatctgtttgtaaatattcgtacatttgctccgcctccagatgctgagcaaactacaacttattaccaatctaaagagcttttcaatctgttaccactatcaaatgtggctcttgggttaagcccgaaccgttattatgaggaacagcaacctgcagaggagtttaattttggactctatgataaaaatcaggctattccctctgctagctcaaatgataaccgcttaatctctcgattaaatagtaacagtgcaaaagagcttaaaactgatgacatctcatttgctgatcaacagcagttagttaacgaagccagtgtaatttatcaaaattggtatggtcatcgcccatgggtaaaacagcgcctttatcaattggttaaaaataagccagtgaagctatcatatgataaaaagaaacgtccaattagcattgtttttaaagtatttcgtgcccaaagcaatgaacctgtaactttaaacatttcgcattctgcaaaatacaagcttgggcttacaagtgaatacagtattgcgaagcaaagtttccaacttcacaactctgaattattaaagtcttttttgatccaccctaaaaaaagtcaaataacgagttatccgagcgttacactcaatctagctaatgatatagagacactgcagtatgtgactttaagttcttcagaaacaatttggttgtctatacttgaagagtacccaatgcaggagcaaaaagtaaggtggtggaataatgaactttaactttattattgtttttgcattattatttactccgttaacaagtgttgagagtgattttgagcaactcacattaaccttgcatgcttggctcaataaccaagatgaagtccctaagcactttacttttagcgagggtgtgttgtatgccaagaaatctttaatttcaggtggcgaaatacattttaagccaaaaggtaaaccctgtatttcttatgcaccgcatagatattttgacaagcatactttactaattgctaaagctctgtttagtgagtgccaagttttgttgacgaatactaagcatagaagcagccgcgacctccaaggtaaaattatagactttagtcaataccaaaatagcagtagtaatgccttcattctggcatacggtaaaattgttgaaacattttcaatttatcaaatccatggatttgcaaaggaaaagcgcactacagagcaaggacgaaaagcagatatcatcatcagcgaaggccatttacatgcatcgcaacgcagcatacacatctctaaatgcctgaattctaaacttgatgtaaatgccctagtttatgggcaggatgtatatgaactaggaggtacacaaaacattcttaattcgctaggtcctgtgaatagtcactttttccatatcgagttaagtcgcgaactacgagagcgcttaattaccaataacttacttttaaagcagtttagccaatgccttatttcataatcgcttttataacacttacgctgctagcctttaaacctgctcatgctgaacagcaagagcatgcagtacttcagccaccgatttggttaaaaacttcacctaaattagatgtgctggcaacgacacaaaagatacaagttgattcttttgaacaccaatatttatggctacctgaagggcattggttggagatcaactcagaactgttagataagttcattatgagtgtaggcaacacacaatatattcagcaacggatacaactggaacgagacttactgtgttctaataaccgctgccaacttccggccttaggccacaaccgtattgtggcaattcaaaacagtcaggatgaacaggctgagttttcagctttagttggccactatcaaacaaaaattgatagctttaaacgcgcattaaaacttgccaaaccttcaatattactctcttcaaggcaaggcagtgaacgtttttataaattcgataaaggcgaagaagttactctttacttccctgatgctaaaaaaattaagctttctgttagaaaaaatatgcaatcactggagcgccacggcgctgtgtatgcctatgttgatgaagtactcacagcaaaagtaaacatcattaataaccaagctcttgaatatcaagatcaacaagtaggtctggtaaatagtgactatttagccattaatgcagggcaatatttaacgataagaagccacacagatgcttacgtaaaaataacacaaagccatcgagctatattcgatgacacaacagctaacaaaaccaaggaaaagttgctgctaccttactggttaaaaaccgctaatgacgcgatggaatcagtttacaataaatattccctcaacgtttttagtgatgacgtatttacgcacaatgagcctttggctgtaaaacgccattatgacttgctttctttaatgtctactcagactctactaaaaggcagcagcgtagtgcatgcctctacatcatcaaaaagtgttctaatcactgagcttgaagaacaacgattagttgatgatcagttttatcctcgcattaataagcaagttagggatattacatcactttctcaagtcccccttcgttatgacttatcgagtcaaaaacgtgcgaccccttggcttacatttgtagctcgaagcgatgaagatagtcagttaaaattgacagctggtggcatgagctggttaataaatatcaaggcaacacaacattaccaaacgattagtgtgtcagttcctgtaaaccacaaaaccatgacaattcaaaaaactactgacgacgttcccgttattgagtttgcagtttatgctcgaacactcactgattttcctagtaacgaagtactctacttacaacctggagctcttgatcagaacagccctatcacagctcaactggtaactaaccacttaagaaagttatatagtgactatcttgcgatgatacagccctatgcgccagcaaggagaaaagttaagttactaaattggcagcaatctatgctaaccgctaaggatttagctaaatcggcaccattagatgcacttgcctttttaaaaccattaacgcaaaaccccgatccatcagtcgcagagcaagcatggcaagttaaaatagatattttacgtgaacaacaccagtttcatcttgctacgagttatttagaaggactatataaaagtacgcaacaaaaggaattgcaacagtttgcattaagatcgctattagaaacttatcaagccgaacagcaagagcttaaactgtttgctctatgtgctggtaacctaaatatattaagcgagtgcagaaatatactgatcgaacttgcaactaagcaacagaaaaaccgacttgcgctttggcttgcacatcaagcagaagaaactcagattgccgaacaaagttatacggctctaaactaccatagtttgagctcaacgataaaagccgaaaataaacagtatggattactttcgggtgcgcaagaaacgttaataaattcacaagggaagttgcaaaacaccgtactctctcaacatatgcattggcaatatacagcattagaaccagtccacctgagcataagtgcacggactgaagccaagcaaaatggcgagtatcaaaccgcatggttaatggctgatagtgaataccagcataaattaataccaatctttagtgatataccttcaaacacattggtcgttgaaagccaacaagcagcctctgtttcttcaacgatgatcgttagtctgcaagctggagaaacacttaatttatcagcagatcagaagacctttctagatgtcaaagatatctctgattcgttatttacacgatttgagtattattctgatgctacgaacaaagtaatcacaggcgatattatgtcgctaatttatgcttatgatgcaacacaacgtgagctgttaattaatggcctatatttattatctaaaaagcgtttaaacaataatgaatacacgcaactattacagcggatcgctacaatacccgcctccgcttcattgacctttttacaaaatagaatagaaagttttggtcactggcaacctctagatagccttgtagattatgctggtacacgccttttcgatatccaaagttctgcacaaactagctttgctgataggtttaaccaattcaaaacgcatttaaaaaataatgaaggattattgattcgaccattccacacgctttacatagatttagcccaaacagagggagaacaaattcgtttcgtatttagtttttctactgcagaactggctcaagctaatgtggcaaacttatctataaaactcgctaacaatttaaaaatatggtcagttaccgagcagcagagcattccttttacatttaacaaacaagagctagataataacattattgcccttcactggcttaatccctatttatctcagcaactaaaagttgaagcacaacaatatattgcaggtcgttggagaaagttagatttacccacaaccatgctattttattctgtagtccctaacacaccactagtggcaacgttgaatgcagatcgcttgattaaattagagaaaatgaataactacagtcgtaacgaacgtcaatttttccacccagcaggaaaaattgaagtcaaagccgctgagcttgagcatgtacgcctttatacatgggaactgagtgatcttaacaataagatttcagagtttactcaagcgcaaattcctttgccagacttagtcacttatcaagcacctgagcagcaaaaaatagtaagtgagcaaacatcatttcaaagtgatgatttaaattggcaagctttcattctttacgatcaacaagaaatatttcagagcgctgaaaatatcccaacgcgacgagacattgatgttggtgctcgcttacgttttaacgacgaaaacaattggtatcaattagaaggctattattcatttagtgaaaaccagacagacataatggcgcttaatggctattattcatggcaagatgatacaaccccctggtatgcgggtgcgcaacttcaaagccgctggcaaccaggtcatgatggctttgacagtcaatatgctcttgatggcagcctttatgttgggcaaaaatggcaacgtgactcaacacatcgccatcaatggcaactgtcaccatttattcgctatagcagcgctgatttaaacgattatctccgtgacgacttacttaattcaagtgtgttcaatttttatcgtgaaaaccatgcatctggttggcaggggttttatcaataccgctatcaaccttgggtcgacaattatttaaattttagtgtttcatccagttcaaatgatgattggacaagcctagattatttacgcttcaacacaagctggaaccaatattatcatgaccatattttccaactcggcattgatagttattaccgctttaaggatgaaaaccgtgctacagccacttggcaatacatcacacaatttgcttggcaaacgcaaattaatttaggtgatttctcgcatggttggctaaaggttcgattacaacaggattgggtatgggacaaccacaatataagtatcgaattttcatcaggtaataatcaacatacaggttttgccccttttgcacatgatgaaattatattcccaacacttcagttaaatcatttgctagagcacagtgactatgagtagtaacggacttacaaaacgccttgaaaatttgcttttcgcagatattgccagtttctggttagatttatatcgtcaaaaataccgcgaactcgtagatgaattaagtcaatgggagctaatcaaggatcagcctgaagattatgacgaagatgactggctattactgcaagccattgcatttttaactcataaaatagataccttacaaaatcaattgaccaagcttgatagcgatcacagacgctttattgaacgtttaaatcatgctgagttaaaagcggaaagacaatttcatattttagactatgcagcagcgcttggcgcaagcaaattgcaactgcaaaaggatcaagaggcatttcaacgttggtttgatgaaggagccatcgtaaaccgataccaagataaagtctctgagcttgagcaatcattgaaattcttaataggtaaactaggtgatctaactaatcgttatttacgcattcactcgggagaaataactaaatcatggttaacacttaacttagaaagtttctttttaggtttattagaaaaaactgagaatgaagcaattcgtaactctatttttcgcgctcttgccaaccaagttaatttaataagtgaatatgtcggcgaaactaagttcgattccaatcttgttgagctactactgttttctcttgagaagcaatcaacacctcatgccgctaaagtggatattttagagatcctgatcaatttaagacccacttttacccgctattttatgcgttcacaaattgatttagatgtcttgccaaatgctaaagtagaacgacaacatttgtttctactgacatctttttcaaaaattatatgtaaacaaccaaaattaaatgaggctaattataaattactaatcttgcttgcaaaacacgcctatccccgtgtaagacagagtgttattgaacaatgcccactattacagtggccttttgctatcaagcttttaatagttcgcttacaaaaagaaactcaacaagctgtaaggctgacactcatcaagcaattaacggatcctcgttttaccgaagagctacaatcgtttcatatatggcgccaacagttaaaaaaagtacaaagctttgcagaaaaacgattgctgttggagcttacgccacggatcatgtttaatttacaagttgaatgtgaagagcaaaatcaagcagatatattatttaagtcatttattaatgtattaaataaacaacttgagaatgaacaaagtattgccgtcagacgcgttattacccgtgttcgagagcagttagtcagctttatgtatcagcaacaagttgctgagatcgaatttaatttaaactctcatttagatataaatttaagctcgaaggagatagagcaagatttacttggccgacttttaagcaaacaagcacaaaataatgaagccttcaacgtaaaagaaaaaagtaaaagctatctaataacaaggggatataagcgtggtttccgcttttggcggctctggcacgaatttagaaacccaagcacaggaaaacgccaaagttttaatcatacacaagctagaaagccaagtgcatttatgcacgtcccgagctgcactgttgcagagatcagcaaaacagaagtgcctggcgagcctcgcttcgatgataagcagttcagcgctcgaccacacttacccatgcttgattttttattaagtattttgtcgcaggataacttaaaaacacctgcaaaatcatttacacctgatggtattttagttatcacgccaccctctaacatactcaaacgtatgtatgcgtatagttggatttcattcaactttgaaaaattagatgatctacgaaatggttcagaggttgaacagcgagatttcttagatctcataagaagtaaaggttttgtacttgaatttcagcaatatgggtctgttcttgatgcagagtttccagtggaatcaagtattgccaacttatataagaaactatctataacgccttttttattcaatatgtgggcaagttttaaagagtatgcctattcactttatcaaaatagtattggccaattaatcttttttgttttggctttttctacatacttttgggcgcgccatattaggataagtaaacaaataaaatcggatagagcaaagatccccgtttcaatcggtggctggggcacccggggtaaatcaggaactgaacgcttaaaagctgcattatttagtagtttaaccttaaaagtaataagtaaaacaacaggttgtgaagctacacttatttatgcaagagcaagtggagagcagttcgaaattccattgttcagaccttttgataaagcgagtatttgggaacaaagtgatgtacttcattttgcaacaaacgtgaaagctgatgtatttctttgggaatgtatggggttaaccccacgttacgtgaaaattttaagaaactggatgaatgataatttctctacgattaccaatgcttatccagaccatgaggatattttagggcctacaggaatagatgtcgcaaatgaaacaagtcattttattggtgaaaatagcctagtattcaccagcgaacaaaatatggctccaattcttgacttaaatgcgaaacaaaagaactcaaatttaattcaagtacattgggctgatagcttacaaataacagaggacatacgctctctttatccataccaagagcacccagccaacatcgcactggtttgtaaaatggctgagcatataggcttaaataaagactatgtatttaaagaaacatcagcacgaattgttccagatataggtgtattacaacattttgccaaagcaccaattgcaacaataagccaatcattcgtaaatagcatgtccgcaaacgagcgattagcaacattagaaaattggcaacgtctcaatatatatcaattaaacgacgatcctaaaactcaggtcatcgcactaattaacaaccgaaatgatcgtgttgcacgttcaaaggtatttgcctcaatattaagcaatgatctccgctttgaccgaatcgtagtgattggtagcaatgtagatggattttatagctattttttagatgcgctcacagagagagtcgataagttaattgaaattaatgatattgaaaacttagagacactactagagcaatttaacctactcacaggctcacaagtaaaggcgcggctaagtagtgcttatggcagcatgatagcagaaaaccttctcaccctaagtgaaggaagtgtcaataagtcttgtataaaagaaatcaccggagacatttcatctcaagaaatcgcgactattctctataccctgcgccactactatcagcgtatagctttagactctttaaagggtgatatgcaaaagtacagggatgagataaaagagcgattaattttaatcacaaagtcaaaagttactctacttgacgacagcaacatatccgcagatgagataaccaaagctattgcaaacctagctttaccgaatacccatcaagtgattgtgggcatgcaaaatattaagggagcgggattaaattacgtatacgcttggcaacagtggcaaaaggtatctcaaactataacaaaaatgctgagcaaacattgctctgcaaaagaatttagaacggcattaacaaacttaaatatgattgtatcatttaatttattagaaatagattatttaaagcaaaacttagttactcttaagaaaagccagcttgcacaaaatgagttttgccaagctgaaataacagctcttcaagaaaaaatttctagcgataatacgtcagtaaacgaagagaattcgcaacctcgtgcacttcgttatttaaatcaaatgatcgaatcatttttagatgcaggtgctgctgttaagcgtaaaaagcgagccattcaaatttatgatgatattgctgaaaaacgcataacattagaaaaagcgataaaattacttagtgagatgaatcgaaaccaaagctcagggtggtttactaagaaatcgaaataagactaactttatgtcgattatattaaaaaaatataaaacttaattatttaaaatttaaacaagagcaaaacgcacattaaaaatcagaattttcctattaaattaagaaatataaaactatcataaacttagattagaaaaccctgtaaaacccacaaataaaccttgtacccaaattgaaaatattcatataaaggatgaaaataaagaagataaaaacactttatctaatcaaagaaaggatattttatgaagaatttagtttgtaagttagctgtattgccactagcggttgcctcagcgtttgctgtagcaaacacaaatcttgttgaaaatggatcatttgaagcagaagttgttagtggtcaatggcaattattcaatgaaattacaggttggacacgcagcgctaatgccccttttgaagtacaaacaaatagtttgggtattcttaaagcaaaagatggccaacaatacctagaacttggctctacgcaacaatatagcgtgtctcaagttgtatcaacagaagctggtaaaatgtatgaatttagcttctattactcagcacgtgcttctggcgatgacacagctagtaaagttgaagtattttggaatggtgaatctttaggcgttgttaatgctaaatttaaaggttggacaaaatacagctttactgtagaagcgagtgaagccagttcagaaatcaccctaaaaggtattggaacaggtggtagtaccggtggctttatagacaatgtatctgtcgctgaagttgcagaatattgctcagttaaatctggtttgtacgcgattaataaatttggttctgatactgaaggctacatttatcacttagatccagaaacatctgcagtttcaccaattgctggtgttactaacactgctgcaaatatcgctggtaaagacggaaagctctactttatggagcagttagatagcgaaactagagattcaaaaatctatagtcttgatttagaaacaaatacacaaagcgaactagcagatactaactcgtacactattacccgttcgacagtttctcctgatggacttaacttgcgtgcaacaagcaaaacttacatgtacgacttcaaccttgaaactggggcgaaagaagtattaggtaaatttagcttcgaaggtgaagagttcaccggcggtgatatcgcttattcatatgataataacgtactttacctattaactgataaagcactttacactgtagatgaaagcacgttagaactaactttagttggtgagcatggtgtaaattgggcatcaggcctagcaattgccgatgatggtactatttacgttactggcagaaagagtggtcaaagcgcgaaactttatacgctagatcaaaatactgctgaagcaacttttgtattacgcggtcctgcacatctgaatgacctaacttacattagtgaatcagtttgctcagttgaataaatacatttgatattttaatgccagtttaatactggcattatttcaacatcccatcatttttatataaaaacctctcctcaacattgatttaaaattacgcgtaaaaaatctgaaaaataaaacacacaataaataagaccttcagaaaaaacaccccgaaaaaagcaataactttttaactagaaaaaataaaaacacaaatacaaaaaacctacccaaaaataaatcaaaaaaaataaactttaaaataagaaatttcctagataaaaacaacacaataaaagtcaaaaggttaacagttaaattcgacaaaacttaatataaacagactaatatacatttgaaaaagagccgaataatattagaattttaatattaatacataacggagaatgtcatgaaaaaatttgtaaccaaactagcagttttacctttagctatcgcatctggcattgcaatgtctagtacaaatttggtagaaaatggttctttcgaaaatactgatcctgtaaccgatcataacggcgaatggcagttatttgatcaaattccaggctggactagaagcagtaatgctaaatttgaaatacaaacaaacaaacaaacgagcttactagcacaggatggtgagcaacgcctagagcttgattcaacagaaaattacagcatctcacaaaatgtattgacacaagcaggtaaaaagtatgagttaaccttttactattctgctcgttcagaaggaaatgaaacaacaaataaagcagaagttttttggaatggtacctctatagctttagtaaacagtactactcgaggttggacaaaatataacttcactgtagaagcaactggcggtacatctgaaataatgttctctggtgcgggaacctctgattcatatggtgcatatattgataatatctctttaactgaagttcctgagccttgccctgtcacaacaggcttatatggtattaataattttggttcagaaaccgaaggctacatctaccacttcaacccagagtcaaatgctgtaaccattgtttcaggcgtgtctaatactgcatcaaatattgcaagttatggcggtatgctttacttcgtagaacagttagatagcacaacgaaagcttcaaagattcatagctatgatctattaagtggtgtgcaaggagaagttgctgataccacttcataccctatttaccgttctgtagtgaaagcaggtggcgagactttacgggctacaagtaaaacctacatgtatgattttaacctactgaccggtgagaaggacatcgttggaaagttaacatactcgggtgatacattcactgatggtgacattgcctactcaagtgacaataatgtgctttacgtactaactggtaaagctttatacacccttgatgaaggcagctttgagttaacattagtcggtgagcatggtattcactgggcatctggtattgcgattgcggatgacggtaccatctatgtatctggccgtgaaagcaaagagaacgcaaaaatttatactctagatcaaaataccgctgcagcgacattcgtaatggatggtcctgcacatgttaatgatttaacttatgttagtgaagcaatttgctcattcgagtaaattgatataaagccataaaatgccagcttgtgctggcattttttatctcgcgaaactaaaaagaaaaaacaagcttttaaatagcattaaagaaaaccctaataacgaacaccaaaataataaaaacaaactaaactttaaaataaaaacaatagtaaagtataaaacagagccaaaaaataatatgaaaattcctagaagcatcttaacccataactttcaataacatacaaaattacaaacctagccaaaacaagaaaacacaaacaataattgaaaaccactttaattaaaataaaattaactcatataaataaaaccaaatataaatgggttaatcatgattaaaaaaatatcaaaactagcaatattacctttagctatcgcatcaacttttgctgtttcaaatactaatttagttgagaatggttcatttgaagctgatgaaataagtgaaagatctggtacttggcagctttataatgaactttcaaattggagcagcagtgaaagtgtatattttgaagttcaaaccaaccttttaaaggaaatgacagcacaagatggtgatcagtatttagaacttaactcaacaaaaaattatcgtatctcgcaaaaaataacaacaactcctggtaaaacatatgaatttagcctctattattctgcacgtgttaacggtgcacaaggtacaaataatatagaggtatattggaatggtagattattagaagctttaaatagtagtcaaaaaggttggacaaaatacacctatactatcgaagctacaggaacaaaatctgaaatcgcaattgccggtgccggtgctgcaaacggctatggtggattagtagataatatatctgttatagaagttacaaacccaacaacaaacttagttcaaaatggctctttcgaagtagacagagtagcctctgctgatggccgttatcaattttttgaaaacttaactgactggagcgccaatgaaaatctttggcttgaattacaatcgtcttctttaaataagattgatgctcaagatggtgagcagtacttagagttaaattcaaatggtgcttatagcgcttttcaagagatacctacagaagcaggtaaacaatatgaatttagcttttactactctggtcgagtagataatgctgaagatgttaataatgttgaggtgttttggaatggtgaattactagaagcattaaacacgactcagcgtggttggactaagtatagttacactgttgaaggcacggatgtaagttctcttatcgaattagcaggtacaggtagtcatgcagggctcggtggttttattgataacgttgttgtgacagaagttgctgaaccttgtgcagttactacgggtttatacggcatcaacaactttggctcagaaacagagggctacgtttatcactttaatccagagtcaagcgctgtgtcgattattgctggccttaacaatacggcatcaaatatcgctagcaaagatggtatgctttacttcatggagcagcttgatagcagcagtaaagcatcaaaaatctacagcctagatttggccactgacacacaagctgaagttgcagatgtaacatcattcccgatttatcgctcaacggtaaccccggatggcctatctttacgtgctacaagcaaaacatacatgtacgattttgacctagcaacaggtgcgaaaacagtattagggaagctttcgtatgagggggatactttctctgatggcgacattgcatactcaagtgacttcaacgtgctatacgttttaacaggtaaagcactttatactttagatatgggtagttttgaattaacccaagtcggtgagcacggtgttaattgggcatcaggccttgcaattgctgatgatggtacaatttatatttcaggtagagaaaacggtgagaatgcgaaaatctataccttagatcaaaacacagcagaagcgacattcgtgatggaaggcccgtcacatgtaagcgatttaacatttgttagtgaagcagtttgcatgaagtagactgagtttaaagccataaaatgccagctaagctggcatttttttattaatcactaaattggtatcatttatttgttagtttcttttgctctaacatttctttccaatgcatcacttctgttggcaaaataggtgttacacctttaaagccagcgacttcaagcatttcctcaacgctcacaacgccattcttacgtttaaatacaccacgcacataagcaatcgcatgtagaccacgctcagagtgaaacttttgctcaatataaaagtatttatgatcccagccaactaaacgcgtactcactgtgtatttttgaagaggtttgatatcacgaatataggtaattgcagtcgcattaacgattgggaaccaacggcgtttcataatatgttttagtaagcctactcgctcagtcatccaggtacgagctagatccatcatcgctaaataacgagaattagtcagatggaaattaatatcgcaatcggttggtaacgctttgaattcaatatcaatcgtgtctaataattgttgataatcacgattacgtttaattttaaaaaacagcagtattagtcgaaaatagaggttcacagtaaaggtctaaccagttgataatgcacaaagtgtatcacagcatattgctaaggcgaataatctgctctaatctgtgcatatattagtataaaaaaagaataacctaatgaaattatttagtttggtaactctatttagtgcaagctttttcaccagctcagcatttgctgactttaactttcctggtgagggctctttacgctatccaacgggtgtcgaaaaggcatttaagtttggttttgcgtggcaacaagaagctgagaagttcaccattggcgataaaagttatgacatgtcactaccagaatcttactctgtagccatcacgcttagtaaagatgaagagcaagtgtgggttcaagaattcaataatggcttcattgaaggctttagttggaatattgccgatcacaccttaaaacttgaaaagagaaagttcagtgattctgtgaaaggtgattacgtaattagccttgataaccgagattacttttttgcccgcaataatattagtatcgtgatcaaattcgatcacgatggtataaaaaatatcgccattgatggtgtcaccaaagatatgggtaccaaacaatagtattcaatagaaaagtaaaaggcttagttttcacctaagccttttttgcttaattaaatattattgcaagctgttaccattaaaccttcacagtctttcggttaatcccataatctctaagtttgtttgccactgcggtatgactcaaccccaaacgtttagcgagctgacgagaacttgggtatgcagggtataacttacgcaatagcgttgcttcaaaacgttttaccgcttggtctaaggttccttcaaagtcagactcaagataacctaaatcatgggtaaaagttggtaactgcaggtgctcaatacgtaattcgttatcatctaacaaggacacagcacggtaaatcgcattttctaattggcggacgtttccaggccaaggataatcctgtaaaaaacgtaagcaatcttccgataatacaggtactgaatgaccattctgctgggcatacttttgaataaaatgctctgctaacgggccaatatcagcttttctatcgcgtagtggtgcaatttctagagttagtacattgatacgataatatagatcttctctaaatgtgccctcttgaaccatagcaggtaaatctttttgtgttgcagcaacgatacgcacatttacttttacttcgttttcatcgccaactttacggaaggtaccgtcttgtaaaaaacgtagtagcttagtttgcagctgagtcgacatttcgccaacttcatctaaaaataccgtaccaccatcagcttgctctaaaacgccgcgttttggtgctgcgttttcttcgtagcccgcataaccaaataattcagactctgcgacatcatccggcagtgaagcacacgataatgcaataaatggttttacagaacgatttgacgcgtaatgacaggcacgagctaatagctctttacctgtaccggtttcacctgttatgaggatcggagcctctaactgcgccattttacgcgcctcgcgaacaacacggcgcattgctgtactaaaattatgtatggtagcaaagctttcttggccgtaacgacgaaacgcactcacttgctgacctagtcgactttgcgacttaatattaatcaccgcgccagctaatacatccccttcagcgccttgtggtacagaaataggcaaaatatctgcaataaagtcttcacctgccacttctacccgtgtggtttgaccaagaacctctttcccttcaagccaacgagtaaaattaaaccctttcagcaagttattgatgttggcgcctataacctcactttcagataattgcaggtcgcgacaagcagcatcattacacaagcgcacccacccttttgcatcaatagaaataacaccatcaggtaatgcacgcagtaatgtatttaattcattatgctctcgctcagaaggtaaaaatgcagtggtacggacatcttttacaccatcaatcaggcggattgatggcataattttttggaattgttcaaactcaataggtgggaaactgacgtacatacgacaatttaccgaatctacttcgatgccttttaaatcgacctggtaactcaccaagatattgagaatctcttgtgcgatacctattcggtcagcacagtggatatctaaacgcattacatcctcaaaaaacgggaacctatagtatgagaataatacgctaagtcccatcaactgggtagtctattgtaaagaattttggacaaatttaagtaaactgtctatttaccgggatattttgtccactctccaccatcaagttgaatatagggttcatttttaaaatacatcattactgtgtcttgattttctgctactttcgcagaggtaggcagattatctaatacacgcttaacaggcactttagcggcgaatatatcaagttcaaaggcattattaataagctcagataacgaaaaatagctcatcgtttcatttacttcggttaactgagcatgctgtattttagggccaataaacttcacagctgctggcacagaaacaatagaaggactcggaatttctcgtaagcctgcaaactgaagcttgtcaccttctaaagcagcgccatgctctggcactaccactaacaatacatttcgccctgaactttctaattggctaataaaagtatcaatgtcatcgaataaacgttgctgtctaagcggataacttgccaaactattcatcctctcacggccagcaacttgattgccatcatggagactaatggtattgtagtaaagtgcttgaggctgctgactattctgatgttttttcgaccaattagataaaatatcagcatcagagtatataggctcaccatcaaaaccatattgagcaggctttagattactaaaatcaagtttaggtaccgaaacaccaccatactgtctgatcaagccaataaaatcatcaaaatgtccatcatgattcatagccacatttgtgttaaatcctaactctgccaaattattaaatagtaagcactcttgtctggcaggtttaaataagtcagcttggcttgtttgtccacaacttgctcgcagcaagcgaatagctgccggaccactatacgaggtcgcagaattaaattgactaaataaaatgtcaaaattagcaaaaagtgaactaggctttacaccaattgcattgagatctgccgttgccaatgaacatatgttaagcacaacaacatcaaatggttcaccattaaaggctttcggaaactgactaataagctgcgattgctgttgataaaagtcacctagctgttgatctggtgttctctgctgagcactgtgcgtcacagtgacaggcgtttgagctttttcattagtagccactaaaaccggtgaggagctatcatttaaaggtgttgagccaagccagtatacatagataaaaccaacaactgacaaactggtatatcgtaaccatttaacagttagaaaataaaaaacaattgcaataaataaagcgaagacaaaatctaaattgatcaagcgaaaggctatttcaaaaaaatagctaatactgaaatcttgtaaattatctgcttgctttgttaaacgcgaaataggcggcagccaagaatcctgatacatcaagacaatgccaatgaccacactgatagcctgtttaagccgtgttaaccaaaccttatcaaatgaaataaccagaaaacaaaagaacgctaaatttgcaaatagatcaaaggaaatagctccttggctaaacaatacaaacttaattaaaaaatataaattccaaatacctagacctgacaacctcacttgttatccttcttttgctttttaggggtatagggggtcaatatcacatgcctaaatgtcaatgtgcgatataaaagtaaggctcttttaaacagtaacttacctgctctactaacaaagagccctaacaccaatgcaacagcaaaggtgatgaaaaattgatttaagctcataatacttcgctttttaaggtcactttaacctgttctgaaattggccggctaagctctctaaattcaggcttctctttatccaagtttgcgatacctgccggctttgcatctaatatatttcgcacattattttgcaattcttttgtgtaatcaggtacatcgctgtcagcatagcgttggtgaatacgtcgacatgcctgttgaatataaaaatgatctgcaatgatattttttgatgaaaagaaatcacttatttgcaacttaaacaaatgtttaatcgcattctctacatcgtgttcacgacaagcatgaaggtacaagtagatatacccatctgcatagctaagaatgtccccctctcgttttacgtgaaataaatgcagcggatgaatagcatctattcttggtaacaattgaagttttacaaacaccccactgacacctaaattagctgctgaatcactgtgctttaatacttgctcagaaaatttcgtgattggcaaataaccttttgataatacattttcgctttctttaagcacatcatccaatgagtgaggaagcgctctagaaaattgaaacccttgaattgattgaatttgagataacaaacgtgatggctctgaaaaactatataaaataagatttacaccgagcgttaaaaataggcactcatcttggtgacgaatgacaccatctacattttgtattaccaactttaattttcgaccacactttttacgaagtgaaaaacaatctttagctaacgctaataagtctgtatggcgtgaaacagcaaaaactatggttgccgccttcttagttagactgattgaaaacaaagtatcattatcatctatcgttttaaatgaagccgggagcttggtaccttgaggaactgcattcctagtcagccatacctcatcttcgtctaaatcttgttgtaataatacatcgctctctacagtacgattaacgtctgaatctattagtgctaattgaccattaaataattgcaggttaattgtacgtccagcaattacaccctctctatgcgcccaaaaatcatactcaagcgagcgaattgacgcttctttagtcatatgaactaaaccatcaaaaaaacgattcatagcgtgtaatcgctgtctcgcttcaccaagctgcgcacctgaaattaaaaagactaaagtcacatccttagttttagtgagtgcttggtagagagtaagcttctcaattaattgctcatcgcttagtgatgcgataacagcagagtctaaatgcacaaagacactgctattttgtagctgtttgtagtgctttaattctcggatgatgcctcgtgaaaaagaggcgctttttgatacgttattactatgctgtaaatgaaacggatagagtaacccttgctcaaataaattaaacaaaacatccgagccttggctatcaaaaaacaaatcaatttgttcagacaagacaaatacaggttctttattgttagacaacatatgcccaactaactccaaaagctggctatttaaaggtgaaagaaacgcatagcttgcccctcgccttaactcagaatacgcagcctttaaccctgttatgtctaaatatgacacaaatatttcctttaaaaaaatactttagtactagttttaagcgatattctatatataatgcaggctatgtccatcgcttgttgatattttttaaacaaatatttttctatgagttttaaatgaataactttgcagtaactaaatcgaatacattaactcaatacgacatagacaacttattgcaaaagtttggtggcaggcagcaagagtatgtcgaaattacagatgtcgaaaaaaatcgtaaaacaatagagaagtatcctcttattagcgatatttcaaacgcaatagcagatgcccaatacacaagaataataaagtagttaaagagtcatcatgaaaagagttttcttaaaaggaattaaaggaggcacaggcacaacctcagtggttgcaaaccttgcctgcgcgttaagaaaatcaaatgagtctgtatttgtcatagacttagaccaaaaaggagatctagggcttcatttcggactagcttgggaacaccgcttaggatggactgattacgctgattttgcttctgcttgcgagcagtttcaccaagataatgatggcgtcatttttttaccctatggtaatcaaaccaatatggggcttgatttttcaagtattatcaaacactcattgcaacttgattgtgatgaaaatacatggatgttattcgattgtcctgcgcatatcgatgtgcttcgctatccactaaatagcaatgatatagtacttgaaatcgttaactgtgatgccatttgtcatagtttggcatataagcgattacagtctctaaaaacggctacttcaacttggcagcactattttttaatcaacaaataccattcagcctcagaaattgagtccgacctattacaattatggcaatcggaattgccgctgctagcaccgctatttattaataaagacgaagtgattaaagaagccaccgcttttcgcaatgttgctatcaattgtgctccgtacagtgttgccaatgacgattttgaaacactcgcaggctggcttgtaagccgtgcaagttatgacaaataaccacaataaaacactcagttggcctgagcgagtcaccagaatattattaagcttctttttgactaagaagctcgttcgctttgttttttataaatttcatggttactataaccaacacaaaatgagcctgattggcgcattcacattgccgtttcttttattactaacttctgtatttataaagttagacaagcaacgtaaataccaaataaaacaaaagctaacatattattttccgcatataaatcagcctgtattcactgccagcaattgtgtccgtattttattacaggcgttttaccttgccttatttagagtaacaaacaaaacatcaaacgataaaagcaacatactatcttggcaaaaggttagcgctttttttcgctatttaaatttaatcgatcggctgttagtaagaatttgcaaacgcacatggtcatttagtgtaaagcgtgtaaaagcagcaccttatcgacaaccttttgattcaaagttgtggcatcaccgctatctaaaagtgttatttgcagtcctgctctttttcgctgttgcagtgtttgtcactgtgccttttagtattgaagcacaagcaatatttattagtttaattttagtcgtcgcttattctttaagacgagtaaagggtcaaatggcaacgattgtcttagtcactttagcaatcacaacatcaacacgttacctatggtggcgctattcagatacactaaactttggcgatccacttgcccttgtattagggatcggcttattgctggcagaaacctacgcttggttagtgctaattttaggcttttttcaaaccatcaatccattacagcgtaaaccgatcgcattgagtaaagatacgtctagttggccgactgtcgatatttatataccaacgtataacgagccacttgatgtcgttaaaccaacaacaattgccgctcaaagtattgattggccagcagataagcttaacatttatattttagatgatggtaagcgccctgagtttgccgaattcgcaaagcaaattggtgttggctatttaactcgtcctgataacaaacatgccaaagctggcaatatgaatcatgcgatgaaagtaaccaatggcgactacattgctatttttgactgcgaccacatccctgctcgctcatttttacaaatgacaatgggccagttcatcaatgatagtaaagtgtgcttggtgcaaacacctcatcactttttctcagccgatccgtttgaacgaaatctaaaaaatcaccgaaaaatccctaatgaaaacatgctgttctatgggttaattcaagatggcaatgatatgtgggatgcgaccttcttttgtggttcgtgtgctgttttaaggcgcagtgccctagaagaaattgggggttttgccgtagaaaccgtcacagaagacgcccatacagctcttagaatgcagcgcgctggctacaaaaccacgtacattaatattccgcaagctgctggccttgccaccgacagtttatctgcacacgtaggtcagcgtattcgctgggcacgcggcatggcgcaaatattccgtttagataacccattattaggcaaaggcttgagtattgcgcaacgcgtatgttacctcaatgccatgctgcactttttatcgggcataccgcgtattgtttttcttactgcaccactggcattaatttactttaatgcgcaaattatctatgccccctttatcgccatatttctatatattgttcccacattattgcaagtcaaaatgaccaattctcgtatccaaggaaagtaccgatactctttctggggtgaggtttatgaatcagtacttgcttggtacattttaaaacccacaacggttgccctgattaatccaaataaaggtaagttcaatgtcaccgaaaaaggcggcttgaacaagtcagagcattacgattggataatatcaaaaccgtatatattactgttacttatcaacgtaattggtatggcttatggcctatcgcgattactctttggtgatagttctcatatcggagttttacttattagcatgttatgggcaagttacaatattatcattttaggtgccgcagtcgctgttgctgctgaagcaaagcaagtgcgtagctcacacagagtcaaagccaacttccccgctgccatccgcttagcaaatggacgcactatcaaagttcgcgtaaccgactactcaaataatggggttggtattgacacaggccacaatcatttgtgccaagtaaacgataaaatcgagctattaatgagtcgtggtttaaaacaattttcgtttgacacctatgtctgcaatacccgtgattcattgatggggttaacccttaaagagctcgatttagagaagcaaaaagcatttatccaatgtactttttcacgtgcagatgcgtggcttgattggcaagacaactttaaacatgacaaaccgtcatacagtttttcacatgttttctataccagcctaagaggctttaaaaacttaatatttcatgctccaaatcaattaagaccgttgattctatttgtatcaaacatattaaattttgtagcgtcgttattacctaaaaaaccaataaaagcattaaaatcatcatgataaaaacaatatcaacattattgctgactgtttacgcactaagtttttcgcagtgggtcgtcagtgcagagcctcttgcaaataaagctatttttgaagatggctatccagagcaggcacctgtagaaacgctgactatgagctttgaaagcctagggctaagcacattcaaattagatggtatcaataatagtgcccgtgttgattttacaaaccgattagacaagttaggtaagcagttaacgctagacttttcgtatacacattcaccgtctttgattggcaaggtgtcgcacttaaaagtgttcttaaatgaaaacctaatgacggtattacccatcggtgataaaaataatcttattggtaacaaatatgagcataaggttcctcttaatcccaagttaatcaaggactttaaccaaattcgctttgaacttgtcggtttctatgacctcgtttgccaagatgatcacagtgccaccatttgggctgagctaagtaaaagtagccggatcacagttgataatcagtcactagcacttgacagtttatttgaatatttcccagcaccattttttgataaccgtgattcaacgaaggtcaatttaccttttatatttgcatcacaacctgatgaacaaacacttgaggctgctgccacattatcaagcttctttggtgcgcaagccaaatggcgcaaagcgcagttcccagtaaaaatcaatcacgcgcctactcagcacagcgttgtttttgccaccaataacaataagcctgattttttgttgaattaccctgatgttgaaaaacctactgtagaaattatcagcagcccgactcaacgctacgctaaagtacttctagtattaggtaaagatactgcacaattaaaagaagccgttgttggtctagtctttggctataaagttatgacgggtcgaagcgcaacaatagatggcataaacacgcttcctcttagaaaagcctacgatgcgcctttttgggtgcgctcagatcgtgcagtcacatttgctgagcttattgattacccaacccaattacagtcagagggcttacgtggtcagccagtgcgtcttgatttacgctttgcaccagacttatttacttggcgtgaaaatggtatcccgattaccttaaattaccgtaacactcccgttgagccaaacatgctgtcacgtttaaatatgctgataaacggtcagtttattgatggctttattttgagtaataaaagcagtgacaccctatcaagccagaccatattacctctactggcaaacgaaaagttgaaccaatctcgacaagattttgagcttaatggtctcgacttatcaacaaataatcagcttacttatgattttaactttgctgtttctaagtctggtgaatgtagtgcaataccagctggcggtgagtttggtgcaattgacggtagttcaagtattgatgtaagccgctttcaccactatattgcaatgccaaacttgcgcgcttttgccaatgcaggctttccgtttactaaatttgctgacttacatcaaagtacattattgatggaggcaaatagctctgttaaagcgatcagtttactgctcaattttaccggccacttaggagcgataacaggctatcctgcgcatcagttagatattcagttcccaagcgaacagttaaaccttactgataaagatattatcattattggtaagcccgactcattcacacaatcacttacaaaagacagtgatctcagtgtgttaatcaataatagccaacgtattgttgatcaagcgatctacaatggtgcatacgacacacaagatagcgacaaagttaaagtaagcataaagagtgttggtcgattagcggtaatatcaggctttcaatcaccgttcgattctgagcgctcagtggtgtcgttaatcgccactaacgacaatgcttacacgctgttatctgacacgctcttaagtgacgaaagaacagcccaaattatgggtagctcagcgatcataaatagtcagggtataaaaacgattaaaacggatgaacagtactatgtcggccaagtgccaatccatactttaatatggttccatctctcagatcgcccctttgttttagcaattttatcgcttattacattattacttatttcatttattttttggcgattgttggcactactaacgaaaaaacgtttatctgaaggagataacgcataatgaaaatctttgcttctttactattcgttttgacattgtctatcaatgtgtcagccgagcaaaactgtgcggcttggcctcaatggaatacatttaaacaccactttatctcgcctgaaggtcgcgtgatcgatttaggcactcaatacgatataacgacttcagaaggacagtcttacgcactttttttcgcattacttgctaatgacaaagcaagctttgataagttactcgagtggaccgaagtgcagctttctgagggtgacttaagtacacgcttacctgcatggcaatgggggattaaaaacaatcaaccacaaattttagactctaaccccgcttctgattcagacttatggattgcttacaccctgtcacaagctgctattttatggaatgaaagacgatacgcagtacttagctcagtgatggctgaacgcattattagcgaagaaacagcctatattcccaaccttggcctcacattattgccagggccaaacggctttgagaaagaaacacattggaaactaaaccctagttatgcgccattatttattttggcccaatttagccagttataccctcattcaccgtggcagcaattacatgataactccgcagacatgctaattagcactgctcccaaaggtttcagtcctgattgggttaattacaataccgataagggtttttatcacgatgaacatgcgccgccaacagggagctataatgctattcgtgtttacctttgggctagtatgatggccaaagatgcaaaatacaaaacagcacttatgcagcagttcaaacccatggccaatagcgtaactgcatctggtaaagtgccattacaaactaatgctattaacggtaaaactcgtggcacaggcccaacaggatttagcgctgcgatgctacctcttctagaaactgagaatcaatcacaagctgtcggtgctattcaacaaacactaatgatggatacacgctttacaactaatcgatactacgacagtgtactttatctatttagcaatggttttatgacaaaacgttttagtcttgataaaaacggtgccttaacaaccaactggagcaataaatgccaataaagtggctacttgctgtgtttttagcaagctccagtgcattcgcagcaacaaataaagaccttaatactcagtctattgattggctaattagccaaatacatttaggtgaagtcgagcgcgatacgcaattaatgtctgacagcttagaaaagctgttaagtattgcgccgcaaaacacccaagtaaaatgtgctgaaatacgtgttttgtatgcccttaaagaaacgacaaaagcacgttcacgactgagtgaactgtctgaaaaatcacacccatgtgtagccagcattgcattgcttattcgggtcgataacgaagacaaggcagttatccaacaagctcgtttacgtgctcgcgcaggtcagtatattgaggctgtgaaaatttataaccgcttatttaaatcaacctacccaagtattgaatttgagcttgagcatattaacttgcttgcgcaagacgatgaacaatatgagtatgctttaaatggctatcgctccttaatgtctcgatatccgcacagcggtcgtatcgagcttgcttatgcgcgccatctattaagtaaaaacccatcaaataaacaaggcttggatctattaagtcattatgctcatagtaatttttacagcgttgaagctgaaagtgcatggctatcaacactaaaggcaatgcctctagataaaaacacgcttcacgcttacgagcagtatttagatgctttcccgctcagcagtaagggaaaacttcaatttaatgattttaaaaaggattaccaagcggagctaaaaaaacaagccgatccagctttcaaaacatggcaaaaaggcagtgtcgaactagaaaagcgaaattttacaaaggcagaagcgctatttaaacgcgccttgcagggtcgcccagaagaccccgaaatatacaacagcctaggtttactgaacctaaggcaaggcagaaatgccaatgcctaccagtactttaaaaaagctcaaaaatacagcatagatgcaaatcgcataacggtattaaaaggtctcgccaataccgcacgtttttggcaatacatagatgaagctaaatcggccatcagtagcaatgaattaaaacaggctgatcttaagcttgatttagcagatacgttaaatgaagaccctaataccgtgttgttttaccgcgcagaacttgccaaacaagctgggcaatatcaaaacgcgatgaacctttataagcaagtgctaaaagacgatcccctacaacagcctactttgcgtgccatgcttgaattaactgcctctgatggtaattatgcacgtagccatcaattttataatggtttaactcgtcagcaacaggcattggttgctgacaattataccctcttacaaacccaacaattacgagcccgtgcagacgaacttacagcacaaggcaagcttgatgaagcggttgatgtattactggtagcaatcaaacaaagtcctcgccaaagctggctttactacgaccttgcaaacttatatcaacaacagggtttggttgatcatgccaaagcactttataaaaaaaccttgtggcaatttccgttagatgccgagctacgctacagccatgctttatttttacgttcgttaaatgattaccaaggcgcactggcaaccttagattacattccaaataacgcacgtactgaacaaattaatgtactaacagagcagctaagcattaatactaagcttgaaagactctctgtcaacaatacagagactaataaagccacgatgatttataagctcaccgagttagaagctcaaccattaacgcctttaatgcaagctgagcttgccagccagtggcagcaaatcaatgagcaacagtatgcgattaggcaactgaagagagcccttactcgtgacccaagcttgagcccttattggcatatgacttatgcaaattggctaattgaaagcaacgataaaaacgctgctgagagctggtttgcagactatcaactgccgaggaacgcaaccgatgctgatcaatcacaatggttagcactgcaagttagttatattaatcgttttattgataataatcatagagttgctaagctgtctgaacttgcaacgcaatacccagataactcagaactggcagaggcgctgatcaatgctcatatcgagcaaggcaataacaaagaggctattactcgctttgagcagcacaccgcaaaaggaaaaactgtgtcaacggatactgctttagctattgcgacacttgctcgtcagcagcaaagagatgatttagctgatcgcatcattgctgggcaaattaatcaagtttcaactgagcaaagttatcgtcaacagcaattaatgaccgcacttgaacaatttacagatacacaaagtgccattaatctcgctgagcagttgctggctaaatcaaacaataaccaagagctctattatcaagcggcagcagttgcacaagctaaacaacaaactacgcttgcacaaagctggtaccgtgcagccgttgataaaaaaactgcaacaagcaatttaactgatgagcagaactatgagctgtatgcccttgatgaaaatgaagcttggtatgtcaataatgccaaacgtcaattgcaaagcatcgagcgcgatgagcaggcgtatatcactgcagcaatcaacctaagcagccaaaccagtacgcaaaatgagtcaactcttggcgctggtgcaacacctattgaagctggttttccactttggggtggcacagggattgttaaactagacccgatgacaatatcgagccaagaaacccgctttgatgaaacctttgcaggcagtcgctatggacaaggggctctgtgtatttttgactgtccatttttaacaattaaaccagagcaacaaggcacggatattggccttgcctggcaaaatgaacaatggcgctttgatattggcactaccccacttggctttttagtcgaagacattgtgtggggcgttaattacaaaggtgatttaggcgattttggttatggcgtcacgtttaataaacgcccagtcaccagctctgtattatcgtatgcggggttagaagatgtctttaccaaccaagtatggggtggcgttagagcaacacaattacaacttagcctatcccatgacctaggcctagactggggtttttgggcaagtaccaactatcaaatcttgcaaggtaaaaacgttaaagataaccaaagctacagcctaatgggtggtagttattatcgctatattcgtgaaagaaacactgaattaagcctaggacttaacttattgcactggtcatataagtataatttaagtgaagaaacctgggggcacggaggctattacagcccacaaaactacttgggtgcatctttacctgttatttttgataaacgggttggtcataattttatttataggcttcgtgctggggtatcttggtcaaccaccaccacagacgacatcgcgtttttcccgaacgaccctattttacaaggccaagctgaggcacaaactgctgtaacgggtgttgtgccttactttgagggcgataccagcagtggtttatcgtataacttaggggcaagctttgaatacaggttcacgccccactggttctttggcggttattttaacctagatagagccgatttttatgagccgaactacggtcagttgtatttccgttattactttaatccagtctacagtgagctggctttcccgggtaaacctgtagtgccttatgcaaactactaactatcgcactacataggggaagtgtcgcaagatcttcccctcaccataaggtctatgtatactgtagcgcacttgtagctaggataagggtgtgtccctttccttcaagtacaaaacttgagcaacaaaccattatcttagctgcatcaaaaaacatggccacccgttcactcattctaaatatagaacgactaaagcaaaaacaataaggcctcaataaaaatcttagagttaggaagtaaatatgagttcattacctaaagcaggtgactttttagggcatcctaaggggttattcctgttgttcggcacagagatgtgggaacgtttcggttattacggcatgcgcgctattttagtattatatttagttgctcttgtgcaagaaggtggttttggctggtcaaatgccgatgcactaagcctttacggtaccttcactatggctgtttacataacaccgttactgggtggatggttagctgataatgttttagggcaacgtaaagcgattatccttggtggtttattaatggctgcgggtcatttcactatgggtattcctcacagctatttagctggccaagaagaaaatgttttctacattggtttaacactgctttgtttaggtaacggtttatttaaaccaaatatctcaaccatggtaggtgacctatataaagaaggcgaccaacgtcgtgatggcgcgttcactatcttctacatgggtattaacttaggtggtgcattaggtccacttgttgcaggttatgctgcagcagcaatgggttggcaatggggcttcatcgtagcgggtatcggtatggtgatctctgtacttatgcaacttgcattaagtaacaaatacttaggcgatattggtgttgtaccttcggctaagctttcacaagctcaatctgaatcaaacactaaagagccactgactaaagttgaaactgaccgcatcaaagttattttcactatgagtgtattcagcattatcttctggatgggctttgagcaagcaggtggtcttatgaacttgtttgctaacgactacactgaccgtatgttacttggttttgaagtgccagcttcttggttccaatctttaaactcaattttcattattgtatttgcacctttagttgccattatttggttaaagcttgataaacgtgaacctaattcaccagttaagtttgctattgcacttattttcttagcacttggtttcatcactatgatcctagcgcttatgacacaaggtcaaggtgagcacttacaaatcagcatgatgtggttagtattattctacttattccacacattaggtgagttatgtttatcgccaattggtttatctatggtgagtaaacttgcacctctacgtttagcttcaatgcttatgggtatttggttcctatgtacagcggttgcaaacaagattgctggtttcgtaggttcattcctaggtgaaggtgaagaagcgctagataacgctatgggtatcttcattggtttaggcgcaacagcggttctttctgctgttatcatgtacttactaagcgacaaactagtagcttggatgcatggagctgaaggccaacatgagccacaaactactgagcacatcttagctgaagagctagaagtgacagctgaaaagcaataatatttattccccgtagcgcccgctgcggggtatttctctcttccctattccctctgcgtccttaaaactgatactatattccgatattaatttggtttgcaaaggaactgagcaagtgcgcttaaacactcaactactggtcattattctgactagcttattactgacagcatgtggtggcgataaaacaacaaaagaagtcgcaacagctcctgatcagtctggtttaattatttctgttgaaaatggtttttccgcacaatttgcacaaggcgatgtcacacttaacgcaacaagtaacacggttacaacagataccacgtttacttacactgaaacaaccgcttcaagcacagatatagagcaaggtattgtctccgcaattcatacttttcgccccaataacctgatatttgctgaaccattaagtttagcgattaagttaccaaatgagcaaactaaccttgcctttagcatagtgcagttagtcgatgagcaatggcaaacactaaccactgagctaagcgacgatggatttgcagtcagcgctatcactgaatttggcagttttgctttaatgtcgcgcaccgtgcctgcagtaagtaaaaccattggcgagcaatgtagtgacacaaccagtaaccaaactgtacgctttatccatgttgctgatttacacgcgcgctttggctttaaagagcagttatttagccgtattcgcagttactacgacaatgccaaacttgaaaacccaaataccttatttaccaatggcggcgacgattatgaaaaaggcaccgtagctgaacaaacatcacaagggttagccactgtcgaagcaataaaagccatggcctttgacgtacgtgtgattggtaaccacgactatgcatggggaccagagcaactgctagattttgccgatgacgataatgctatcgtgttatcaagtaataccaaatatgatggtagcgatgatacgccgtttgccggtgtcgatttttcagttgttcaagttagttgtcttcgaattggcttttttggcatgacttcagtgccttggaatgaacttgatgaaccagttgaagacgatccaattcccgattttatcgctaatttcaaaatgaattggcaatggcaagaagtggcggagcagattgttaaccaataccgtcaagatgttgattacatggtgatggtaagtcacttaggtgaaggcacagatacccgaattgcacaaaatgtagcgggcattgatttagtgcttggtgggcatacccatggcggtgaaagttatcaaaccttagataacggcagcattgttattcagccaaacttttttgcacaagggctaactgatcttaccttaacctttaaccttgaagacaaaactcttgctgatgttgattataataccgtagcaacaaccagcattacgaccctagatgaaagcactaaaactgccatcgatgaaatcatgggtcgttatgcgccagatgcaaacaccgaaattgccgtttcagaaaattacccaaccgcagaagaactcactgcaattacagccaaagcgactatgcagcagttccctgctattgatgccgtcttgcttgatgcaagccaagtacaagatcgctggctaccgggtacattaacccaagaagactttcatgccgcgtttaaggttgaacgccagccatcaaatacctcagggtttaatgccatttatcaaatcgcggtgactggtagccaattaaaaactatgcttgcaagccagcctgaatgggtctctttagtgccagataacattaacgatgcaagcacttatcaggttgccctatttaaaggcccggcgcttaatactgggttgttctttcctactctgccaagcctagaagcccaaatggtcgctgaaagttggtggttgcttgataactacgcgcgatcacgcaccagccaatgtttatatattgacaccgataacacacttaacgcctgtaaaacggatgatgcagtcacagtatggaattttaataacccagagcaaggttttagtagtgactttggccccgcaacactcagcttttatgaccctgaagacaaaaactgggggccagagaatagtcaatttgccaccacctcagagcttgacgttgctgatttaccaaatggtggctcaggcgtgttagctttcgctcgccatagccctacccaaggcttaatcttaacggccaatagtgctgccaacggtgattaccaaacagaagggtttatcgctgattacaccttagtgatggatattatgtggccagaacaaagcaccaatgagtggcgttcattattacaaaccgatatgactaatagtgatgacgcagacctatacgttagccgagataacgccattggtattgccaccaccgacagcggctattttggtgaagtacctgctaacagttggcatcgtattgcctttgtgttttatgctgctccaaacaatggtgcactaaaaatttaccttgatggcgagctaattggttttaaagatgaaggtgaaattgatgaacgctgggcaattaacaacgcggcgctgcttttaaccgataatgactacgaaactaagccgggttacttaaacgccttgttatttgctggtcgtgcgatgactgatgctgaaattgccaatatgggtgctgcgcaacagcaacttaattttacgcaatcaacccgtatcctaaatcaagtggttgagcgtcattatcaagctgcaccacaaattatgagtaacccttggttacaacaacgtagcaagttttttaacaaagcgcgccaaaccgtaaactaaactatacaatcaacttaatgaaaaaggccgtttcaggccttttttatcgccttgcaaatactgaaattaattatttaaaacaaatagataacttaagtaaaggatgacatccattagtcaaagtagcgccctgttcattgcctttgaaactgcaattgctgaaattaaaatcattgtcccatttaatttacaaaggctgctttgactaaatgtagtcgagatcttccccttattaagattctggttaatcatccgctcattacagaacaataattctttttagcgcagtgcttataattgcgggagtaatgacaatgagcgaagtaaataatccgttaggcctagtgggcattgaattcactgaatacgcaacaccagatgcagattacatggacaaagtgtttactgattttggcttttcaaagctaaaaaaattcaaaggtaaagacattgtttattataaccagcatgacattcatttcttactaaacaatgagcgtgatggtttctctgctgaattcgctaaaagccacggtccagcgatctgttctatgggttggcgtgtagagaatgcacaaaaagcattcgaagttgctgttgagcgcggtgcaaaacctgccacagattcaacacacaaagatttaccttacccagctatctacggtatcggcgacagcttaatctatttcattgagcaatttggcgacaaagggtctatctatgagtcagacttcgaagatctaagcgaacaaaacattgttgaagacaaaggcttcatccgtatcgaccatttaaccaataacgtttacaaaggtacgatggaaacatgggctaacttctataaagacgtatttggttttaccgaagtacgttacttcgacattaaaggtcaaaaaacagcgttattatcttacgcacttaaatcaccgtgcggcactttctcgattccaatcaacgaaggtaaagataacaacaacaaccaaatcgatgagtacttaaatgagtacaatggtccgggtgtacagcatttagcattccttaccaatgacctagtaagctcacttgataagcttgaccaatcaacgattgcgacgcttgatatcatccctgagtactacgacaccatttttgaccgtgtgccttgggttaaagaagacaaagagaagatccgtaagcatcaaatcctagtagatagccaaagcgaaaactgttacctactgcaaattttctcgaagaacctattcggtcctatcttcatcgagatgatccaacgtgtagatgacggcggtttcggtgaaggtaacttccaagcgcttttcgaatcaatcgaacgtgatcaagagcgccgtggtgtaatctaaatcatcataatgaataaaaagcagcgtgtggtttgggtatattcacacgctgctttttctcgttttgaattctgtttttaaagtaactgtttaaattgcgttgattgcctccatatagataactaataaatcagcgcgaacaaataaggaaagagtatgagcctaattaacgaaacccacgatattaatttaaaaagctgggttgcatctgctaacgaagcgaactgtgacttcccaattcaaaaccttccttttgcagaagtacgtcgtaaaaattcagacgaagcgttccgtggcgctgtagcaattggtgaccaagttatcgatttagcgaaagtaaacgaacttggtttattctctggtgatgcacaggttgctgttaaagcagcaagccaagctacattaaatgaatttatgggccttggtcagcagtattggtcggcacttcgtcttgccctatcaaaagcactccgtgagggtgccagtgagcaagcacaattaagcgaagcgcttattgctcaagcagacatcgaatttgcgctaccgtgtcgcattggtgattacactgacttttatacttctatttatcacgcaacagcagtaggtagtttgttccgccctgataacccacttctacctaactacaaatgggtaccaatcggttatcacggccgctcttcgtcaattgatgtttcaggtcaaacgttccaccgccctaacggtcaaaccaaagcaccagatgcagaagtaccttcattcggcccttgtaaacgcctagactacgaacttgagttaggcatttaccttggtaaagggaatgaattaggcgatgcaattgccatcgaaaatgctgaaaaccacgtatttggtttctgtgtatttaatgactggtctgcgcgtgacttacaagcgtgggaatatcaaccattaggtccattccttgcgaaaaacttcgcttcgacagtatcaccttggattgttacaacagaagcactggcaccatttagaacaaactggacacgtgacgaaaacgatcctcaaccaatggactatttagagtcagctcataaccgtgagtttggtgcattcgatatcaaaatggatgtgcaaattgaaactgaaaagatgcgtgcagctggtgaagcaccaacacaggtatctaaatcaagcttcaagcactcttactggacagttgcgcaaatggtcgctcaccacacagtaaatggctgtaacttccaaccgggcgatatgttgggttcgggcacgcagtctggtcctgagcatgaagaagccggttcattactagaactatctcgcggtggtaaagaaaagatcactctagcgaatggcgagcaacgtactttcttagaagacggcgataacgtaattatgcgtggttggtgtgaaaaagacggttttacacgcattggctttggttcagttgaaggtacagtgttacctgcaaaataaaagtaatcatttgttataagggcaatttttgcccttttttttgcattttttataactgggttacaaatttttgctagcttttttgaatcatattgctatcttaactcggttattagtcattttttatacgctatgttagttaaacttaagtctttttatcgcacgttttttccagctaggcagctgttgatccgtcagaacggcgaagtaaagcaccttattcttgcgccttggttacagctaacgacgtttttaattgtattaacagcagttgcttggttgagcatttcgacgctgcaaatcatttcgcaagccgatcaaatatccagcattgaacaatcacaacttagcaagcaacaagaatggcaaaaaaagcatgctcaacaacaacttacataccaaaaacaagtagaacagttggccattctagagcaaaagcaagcgttattacaaagcatgattgagtcattacctgaatcaatcaataaaaccacttctgagggcagtatcgagccggtactgctcccaattaaagaacatgccgaagagtttcatgcaccgttagaagatgaacaccctaaacaagcaatgcaacttgagagcttttcagagcgtatagcacgacttgataaaagctataactacacttttggcatgctcgagcaacaaatccaacaacgccatcaagaaattttagcaatgcttgaaggtgcagggcttaatgatgcgcttgtccgaagcgcaactgacgaaagcgacacagcccaaggtggtcctttagatttatttgacgagtcaaaaattcccgctgaatttctaacgattgcagataaattgctagcgcttaataaccttgaaaacctgttaagtgaattaccgcaaaccctccctgctgcagattattatatatccagtagctttggtctgagaaaagatccaatgaatggccgtcgagcatttcataaaggggttgatttagctggctggcataaaaccgaaatttttgcccccgcagatgcaaccgtacttcgcgcaggaagaaacggtggctacggcaactttattgaacttcagcataaaaacggttttgtcacacgttttggccacctaaataaaatcaaagtaaaaaaaggccaaacagttaataaagatgacgttattggcttaatgggtagtacaggtcgcagtacaagtactcatttacattacgaagttttagtaaatggcaagcatgtcaacccagttaaaataacaaaggcgctttctcgtgttcggtaaaaaaaaacaagctccagctagctcaactagctctactttaaaaagaacaaaccatactccctctattattgcagaagatgttcgcttaactggcactttagtaagccaaggtgaagttcaacttgatggtcgtattgacggtgatttaagagtaaaacatcttgttattggcctaacaggcatggttgaaggtcttatagaagcagatagtgtcgtaataaaaggcaagatcattggctccttgattgcgaataaggtaaccatagaaagtacggctcaagttcacggtgatgtgtttcacgatacattaagtattgaagcaggtgccaatatcgaaggcagcttaaagcatcgtcatgaagaagacaaaattgctcctatcaagccaagctcaagcgatgaaagtagcccatcaatactccctgacgatagcaacgacttgtcgtttgtgaacaaacaagccgctgataagtcttaacgttttttagccgttacatacatcgtaatatccgcggtgaacactaactcatcgcggctattataaaccttcaccgggacaacgatatctagcttatctaaccactcgtttggcacctcaatctgtgcgactgcacgcatatcagtatcaattttcgctaaataatttaccgtcatcccctttgggatccagcgatgtgttttggcaggtacagttgcatccaccattaagcctgcgcaaagctctgctacattacactgagcaatggcatggatagtaccaatatgattatgaattgctcggcgatttttaacgattgcgctgcaatgccctgctgacaaatctgtgatcgatggttttattgagccaaaataaggggctttaaaacacaccgctttactaaataaccacttcccttttggtaatgactggcatttagtccaaatttttaataatgatgattgtgagctcacgacgtttatccattctttttatgatgtgagataaaaagctaacacatcagaccagatagcgaaatggaaaatttttgtaagcagttttaatgattacacatttcgctaagtgaatgcttttcttttcctttaggggcacataaaataccgttttaaaggagagcgaatgcagtcacgccaacacaaaaacctaagtctattattcatcctaggccttctggttatatttagtccattagcaatagatatttaccttccagcatttcctactattgctgaacagttcaatgcttcagaaaagcaagtacaacaaactgtagccatatttatgttaactgtagggcttggccaactcattgctggcccgttagctgataaattcggtcgtaaacccgtggctttagcaggtgttataatctatggtttagctgcttttggcgcttatctggcacctgattttgcaagccttatggtagcaagggccttacaaggtttaggagcttgcgctacgtttgtggtggcatttgccatcgtaagagataggtttggtagtgaacgaagtggccaaatcattacttatctcaatggtattgtctgctttattcccgctcttgcgcctattctcggtgcttggctcacagtacagtttggttggcgcatgaactttttattcatggctggctttgcgctaattggtttattcataactttgttaatgtacaaagaaacacgccctgcagacagcatttacagcggtcacctgcttgatttacgtcgttttattccgattattagcacacctttgtttttatttcatagcttaatttgtttagtaactatgtcggctatattagtgtttgtaacattagcacctggttggcttattactgaattaggaggcagtgttagcgattttacattctggtttacttgtaatgcagtattaagcattgttgccagctttattatgccgctgtacatcaaacgtcaaccaaagcgcgcattaaaagctggtctcttattacttgttatatctggtgtcttaatgttggcactaaaccaacaacgcactgctctggcattaatgtttcctatgtttattgctgcatttggctttgcactgacacttggctcatcagctggtcgcgcattaagtatgttttcgaaacaagcaggcaccgcttcagctcttattggtgtaatgcaaatgagtggtgccagcttactggtatttcttacacagtttctaaatttaacaaccccatcactgattggggtacactttttattgctcataccatttgcgtatctattatttaggtataagcaactatcataaaaaagttcacccgcacttttatactaaatacgggtaaatgagaattgttatactttatttacccgtttagacttcctgttataccaataaactataaaaagcctttttatagaataaattgttccgtttttctgagtaatttaccttgtacccatactttcgttaatttattgtttagtctcgttaacgcaaagttaaccaaacaatatgtcagggatactatttatgaaaaagaataaattagctttagctctaatcctaagtggcctttgtgctgcgggtacagcaaatgcagcaaacgatcgcttcatcatccaagtagataacaacaaaaaaggcgtagttaaagcactcgctaaaaaactcggcggtgatataaaagtcgacggtaatggctttattgcagcacaatttaccggtcaagatttagcaagcattaaaggcttgcttaataacccacatatcaaactgattgaagaagaccaaaaacgtgtaccaatggcgctttataacgatgatgctggtaatgcaatgcagcagcaattaacgccttacgcagtttaccaatcacaagctgacctagtaacttttgatgctaatgcgggcatgaaggtgtgtgttattgactcaggtcttgatgcatcaaaccctgacttcatttggggtaatatcacgggtgacaacgatagtggcacaggtaactggtatgacaatggtggccctcatggtactcacgtagcaggtacaattggtgctgcagataacaatatcggtgtagttggtatggcaccgggtgttgcaatgcatatcatcaaagtattcaatgccgaaggttggggttattcttctgatttagcacatgcagcagatttatgttctcaagcaggtgcaaatatcatcagcatgagcttaggtggtggtggtgcaaatagcacagagtctaacgcctttgctaatttcactaatgcaggcggtcttgttgttgctgcggcgggtaacgatggtaacagcgtacgctcgtaccctgctggttattcatctgtaatgatggttggtgcaaatgatgcgaacaatcaaattgcagatttctcgcaatttcctagctgtacatctggtcgtggtaaacgcgctactacagatgaaactatctgcgttgaagtgacagcaggtggtgttgatacactgtctacttaccctgcaggcatggcaacttctgcaagcttagctgctgatggcgcgggctttccaacatcgtcaatggaaaactcaggtaatgcatctggtactgcttattacatgggtactgctgagagcattgattctggtgcagctggtaaaatctgtatgattgaccgcggtaatatctcattctatgacaaagtaaataactgtgaaaactcaggtggtattggtgctgttatcatcaataacgaagcgggcatgttatacgctacattaggtgataccaacgatacaacgattcctgctgtaggtgctgcacttgaagaccgttcagcgctgcttgcaagtacaacgattgatattaccatcggtactagtgactacggtttcatgagtggtacatcaatggcaacacctgccgtttcaggtatcgcagcactcgtttggtcaaatcaccctgagtgtacaggtacagaaattcgtgacgcattaaaagcaacagcacaagaccaaggcgcagctggccacgatgtgtactttggtcacggtattgttaaagcagccgatgcggatgcatatttaactgcaaatggctgtgctggcggcaataatggtggcgatccaacaccgggtggtgatgaagttagcctttcagcatctggttataaatcaaaaggcacagcctatgttgatttaagctggagtggcgcagcgactagtactgttgatgtataccgtaatggtactttggtaggttctgtagcaaacacaaatagctacacagataccatcacaacaaaaggcggtggtagttacacataccaagtatgtgaagcacaaagcacaactgtttgttcaaacaatagcactgtggttttttaaaactttccccaaaccaatatgagcgggcattaatgcccgctttttcttttttaataagcttgttaaaatcagttacctgcttttttaatttgtgccaatgatcaatccagaatcgttactgtcgtttttaggcgccagttttttaattgccgtagcccccggcccttctaatgcatttttaatggcgcaaacttttgccaatggccgtaaagccggaatgcaaagtgcctttggctttgcactcggtggcgttgtgcataccttttttgcagtcgtaggcttaaccgcaattcttaaagcctctagtgtcgcgtatacaacggtacaataccttggtgccgcctatctttgttatttaggtatcatcacactaaaggacacctttagtcagccagaaccgcactgtgaagataaacctcatgtgagcaccagtaaaaagcaaaatgtgatgtttcaagcgatgatgactgaggtcctcaatccgaaagtagccttattttttattgcgttcattccacagtttgttgatccaagtttatcttcaacgacctttcagctcgctttttttggtttactctacccgctttttgcttttccaatcgactgcacgtatatttatttcggcgataagatagccagctattttcgtgagcatccacaaacccaaatttggattgatcggatcacgggcatagtatttattgccttagcaattaacctattgatataagagcacttatggaacaaaaacaacaagccctccccgccaaaaaaaatatagccctcgttgcccacgatggtaaaaaagcagcgctgcaagcttggtgtgaaaagcatcaagatgtgttaagtaagcacaccctttacggtactggcacaacgggtcatttaattgagcgcactacagggcttgaagtgataaagctattaagtggcccaatgggtggcgatcagcaactcggcgctaaaattgctgagcatgaagtgcatatgttggtatttttctgggatccacttgcatcgcagccacacgaccctgatgtgaaagcattattacgtttagctgctgtttggaatattcctgttgcctgtaatgaagtcagtgccgatatgctattaagctcacctatgatggaaacagagctgtgccgcacgctgccagattacgaaaaatacctcgcaacgcgccaagtgactctttaattcttaaagtcgatatctcaaagtgggggctattagctataaagcttttgcgcccacttagttaaacctgcagtaacactaccaaagtgatccccgttcagcatagtaatatcacctaaatgggattttaacgcggccttgatcagaggtgattgcgcactaccacccgttaagtaaatgacatttggcgttgtgcctgcctctttaatcgcttgtttagctaagctcactatttggcttatcgagtcatcaacagctaaggctaaatcatttaaggtcaaacactgagttaattcagaatctaagaaatgcaagtctgtggtaaattcattcgctgacgacaatgcaatttttgccgcttcgccttgctgtactaattggtgaccttgcttattttgctgcaattgaattaagcgtttaaatagcgctggctctttaacttcacgcagctgggtcaataattcacgatgatgggcatcgctataaaactggctttgtagattcacatcattgattttacatgcttgccaaaacggttgattaggtaatggcagcccagatttaaactctgtgcctaaaccaagcaatggcattaaaccatgaaaactcagcgcaatatctaaatcattccctcccacacgcttaccactgtgagctaaaaagtcattgtcacgacactgtttttgacagaagcttggtcccatttgtacgaatgaacagtcgctggtccccccgccaatatcgacaaccaatactttttggtcttgctgcaatgaggtttcataatcaatccctgccgctaatggctcatataaaaatgaaacctctttaaagccagcacgctttgccgctcgctctaatatacccagcgcttgttgattagactcttcaccaccaactgattgaaagtttaccggtcgtccaattaccgtttctgttaatgactcttgcagtgattgctcagcgcgttgttttatttttaaaatcatcgccgtagcaatgtcttcaaagaaattaatttgcccttgctttaagcccacagcgccaaagaacgactttggcgattttacaaagtaaccttcctcaggaaattgcacatactcgctaatggcttcacgaccaatgaataaggtgtcatctccagcttgaatatctaaatctgatttaatgcggggaatggtatttagaagcgcttgacgctcagttttaaaatcgtgctcaaatgagctgccagcaaggtgttttgcgacaaaatcaacaaccaacgcactgtgatgggtataaagggttgatggtaaatactgtttgccttgctcaagcggtactaaagacacttgttgctcgttatctaaaacaccgattgcacaatttgaactaccataatcaaagcctgcaaacatactaccacctatacatcattaaaaaggccgcgaaatttaacacagtcgcggccatttttgaatgacgctatggcctttcgtgtaaaaagctggcaaagcgtggcaagccattttttgtaaaaccatgatatttataagtaatcgtactgccaatcgctggaggagactttctttgcagatcagaaaatccagagccaattttaaattcaatcccttcattgttgcgtacttttagcgccccaagcatatttttatatttaccttttcctgctatgtgttcaataacaacagcctcagcatccaggtaaggcttcaattttaacagtacattgctgcgccccgctgtgtgttccgcttttgctaagtgcagcataacgccttcggcaccttgtgcaatcaactcatccataaacatactaagctgttgattattatcaaagtgcttctgttcaactgcttttatatgggggctatttagctgtctaactagccgtgaatagttttcatagcgtttactaaatggtaactcggcatttggcatatcgaaaattagatagctaacggtctgccattcgctatcaacaggttgctgcgatcgcacaataccactgaccttggcaaaatcttgatgcttggtccaaagttcaccatccaaccatatatcaggcagtggcgcagtaaaccaggttggagcattaatagggttaccattacgggtaattaattgcttacctgtccatatggcacgtacaccatcatatttttcactaactaaatagtcagatacattaaccttttcggcttcatagacgtttgccaaaagtactgagggagcttgttgagcttttactgagaaagccaaaagtaacgaaattgcgcataccaatgcacgagtgaacataaccatcattgcttccttgcaaatttgtaagtattaactggttattactgcttaaaaataactgtttagcaatagccgtttaattatagtttagtttctagccatttataaaattcatgcaaatcactaaacaccccagccgctttgctaaaatcatgctcttgggtaaagtgattaggcactgcatacacagcaacaccagcgttgctagcggctgtaacaccggtaaacgtatcctcgactgcgacggcttcattggctttgatttctaacgtatcaagagcgagttgatatggatcgccagcaggtttgggattgttaacatcatctttggtaaccacacaatcaaaccaatcaaaaatgccgtagccttttaaaataggataagcttcatctttggcactgcctgttactaatgccatttttacaccactggcttttacttgctcaagcacagcttttgcgtgcggcatgaaagttggtaagtttgtactgacaaaacggccaaatgcagcatatttatcatctgttagctgctctggactgatgttaagttgatagttggtaacaacctctttagctgcttcaagggttggcctaccagaaaagcgctgacaaaacgtagtctcatcatattgcacaccaaaaggcgctaataagtcgttccaaatattaaaatgcacactttctgaatctaccaaagtgccatccatatcaaacaaaaccgcttttaaagtcatcctcattccttttacgatctaaaaactaaaaggtgcctatggcacctttaaataattcaatataattactcggttaagcctgccggaggttcagcaaacgcttcttcacctgtttctacatcgaccagctcatagcctcgttgctttctaactacttttaaaatcggtttagaaaaagccgtttttaaacgctcagcatctgcttctagttcttcaacagtgtgaccaaacggagcagctcctgtttcagaccaattggttactttaccattgaggttatattcaacttcatgaatttgatattgtgccgcttcatcctttgttgcttcacaaaaaataacgcggtagttccaaaatccagccatagaaattctcttctcttaaattaatcctgccactttagcagttacaaatgcgattataaacgaaaaaacccgctatacagcgggttttaataggcttttaatttcagcttagaagaagcttactttgaactcagcaccgatgtaacgctcttcgttcaccattgctgtgttgttattaaagtcgatagcgccgattgattgctgctcgtcgaacatgttacgaacgaatgctgatacttcatattcgttgtcaccttcagcccaagcataacctgcacgtaaaccaacttcagttaatggcttgccttcaaactcaactgactcatataagaagtagttgatttcgctacggtaagacacgtcagcgtaagtgaagaattcaccgtcagcaacttcgcggctataacgtaaagttaagtttgagatccactcaggtgcgtgcggtaagctgttaccatcaaggacagcttgacctgcgctgtttaatgagtttgtaacagtacactgtgcacatacgtcaacggctaagtctttatctttaagctcagtgttgttgtagcttaagttaaatgtagcgtttaggttgtctgttaatacccactcagtgtctaactcgaaaccgtaaccagttgtcttatcagcattaactaagcggttgaagtttgcaccaccacctacagctgttaattgttggtcatccattgtgtagtagaacactgtcgcgtttacacgaccttggccgtcaagtacgtcagatttgatacctgtttcgaaagacgtcacagtttcagactcagcaacagttacttcgtcaccgaataagatacgaccttgaatacttggagcacggaagctgttagcaacacgcgcgtaccagtttacgtcatcgttgatcttgtagttagcagataaatcccagctaacgtggtcgtcacttgggttttctgtaaggtataacgcactaccaccaattgggcttaaagtacggtctgctgagaactctttttcgtcatctgagtaacgaagacccgcagtgatttttaagtcgtcagtgatagtgtaatctaatgaaccgaataccgcccatgctttagtatcttgttgctggataacatagccgtttaactcacctggcgttgaaccgtatgtatcgtagctgaagttttcgattgttaacgcttcgtcaaagtagaatacacctacttggaagttaacgtcgccagcatagttgctagataaacgaagttcttgcgtgtactggtcttggtcaggaataccgtcagcactttcagagtagaatgggataaaaccagggcccatatctggtaagtagcttgcaccgtaaccaccgtcgatgtcagcgcgagaatagatttcagcactttcccatgcagagattgacgtaagagttaaatcgttgatatcccactcaagctttaagcttgcgccttgagattcaacttgctgtgtcgcacgagaagcagcatcgtggtaaaccacatcgtgctcatagttatcagctaaattgtttgtgcctgctttgatagcgttaccacggaatgcgattggcgtaccgtccatatcacgtacgtgatagttgaaaagacctgtgaaatcgtcaccttcatataagaactgaacacgtgccgctttttcagtgtaaccacctaatacgtcatcttgttcaaaaccaggagcacggttatcgatgtaatcgtctttttcttgccaaagtacagaaacacgcgttgataaacggtctgttaagccaccgccaacagcaccttcaaaatcaactgcgccacggctaccgtaagatactgagccatagccatcaaattcttgtgatggtttaactgtatcaaatttaacaaggccagccggtgtattacgaccgaataaagtaccttgtggaccacgtagaacttctacacgtgcaacgtcaaatacagggaaaccttttaaaattgcgttctcttgaacaacttcgtctacaactagcgaaactggttgagaggcatttaggtcaaagtcagtgttacctagaccacgaacataaaagcgtgggaaagaacgaccaaacgaagattcgattgataggcttgggattttcgcgttcataaaacgaatatccataccagctgagctataagcgtctaaactgtcaccttgtagtgcagatactgctacaggtacttcctgtgcattctctacacgtttacgtgcagtgatttgaataacttctaattggttgttttttgctgctggtgcttcgtctgcagcaagagttgaaaatgaagtacctgctacggcagagaacaacgttgcattgataagtgttgctaacgtagatcttttcattgctttcatgtcgggttttaaccttttttatgcactcttattcaacggtgatgatgttgcgtcaattcatttgacgggctcggccaatttttcgcgccttgtaataagctgcgcggacctcttaatcgagagtgcaaaacgaggtaaagaggctgaacgaacgctgacgattataacactttatgacacttttactgcattaaaaattataaatatacaaattttttacaacaattagcggcaacatcgccgcatttagaagattttatgcaattatttttcaacaaagcggacatatgtcctgtgcaaataatcacgacaatgtgtaggcattgtgtacagatgagagccactttcatttaacccttttttagtaactattcaccaacgcgcgcgaattctggattagccaattcacaattatgctcatttaataatcctagaatagcaaggtttaactcttcaattacttccatataaaatgcaaagtcaaccgtttctacgtagcttagtacatcaatttgtaaagcccaaggtgtaaaccctttaaaacgcactctacaaggttcaaatgcaatatgctggtgctgctctaaaagctcacgaagggctgtcataaaagcttgtaagttttgctgttgggtattagcgctaagcatcagtttaggtcgataagaaatacgctcacgctcagaaatattctcaagctgcatatcaataaatttagcattagcaacatatataacagagcgatcaagggtgcggatacgcgtagccctcagccctatttcttcaatcgtaccaagatgattaccaaatttgcacaaactaccaattttaaccggagccgaaatgtaaattgtaatagccgctataatgttctcgactgttttttgcgcagccaaagcaatggcaaggccgccaatgcctaaacctgctaataaggttgttgcattgaagcctagattttcaaaccacacaaatagcaacgaaataacgatcgtcgtttttacaacattgctaacaggtctcaataaaaatacagcttgtggtttatcttgatttataaagcgttggcttaacctatgctttgctaaatcaacagcgcgcaaacacacccacccccaggcaataagtaacacagttgcaccatgaaatagagccatcaccgcaatagtgacattagactgatcacttaatgaacgtgacagtaatactgcaagtaataaacaaataggaccatttacaaagctcaagacgtcgtcttcaaccgctacctttttatgtccaagcacaaaagtaattagccgagtaatgacaatcgctgcaactaaaaacaacacaaatgaaaaagcaaaatagatccattgccataacattacgcctaaaaattctaaatcaggcaaatgcttatataaccattccccaatcaagttatagccaaactccttggttaaaagaggtatttgactaacggtagcgttagagattttccagatccggttacctgttttttcatcgggcacaagctgtaataaaacctgcacttttccttcagatgttttaatttctcccactaagtcgcgatagcttggcacatcttctttttgcttccctttgggtttattacttaagctatctacatctacccacaacgtgcgatcaagcacgactgaaaggttctctgcaagttgtaattgacctacagctagcacctcttgcggcaggtttctgtaatcaaggtaatttttcgcacgttcaaagtcacggtttcgagcagcttttaagtaaccttgcatggcacttcgtggggtgagtcgatcaaaggcatcaaatggctgatcatcatcttgttcaacgctggggtcagcgacagtggttgttacttcttcaacttgaaggggggactttttttcttcttgctgttctttgctatctttatcgatgagcgatttcacggttacttcaggtgttgtagcgaatacagggttaaaaaacaatgccaataaccacaccgataaactggttaaatatagcggaaacttgttagcgcaactcttcacacatcattccttgttcgaaaaacattaaatacgattacaaattttatcctataaattagagcatggtttggataactgtacaaaaaataattaaatacctatgcaagcagtcagctaaatgttagttataaaggaacattagcaaaggaaaaatataatgcagatctcaagttcactgatccctcattggtcatctttacttattcatggggctatcgccattatctttggtttatgtggttggtttgcacctcaagcctctttagccgtattaatgtttatatttgccgcttacttctttgtagatggttccattcgaacctggcttgcaattgcatctaaaaaagacaacccgctttggtggatgctattaataggtggcttgatatcaattgccgcagcactcgttactctgtttgcaccgaatgtgactgctattttaatgttgtactttattgctgcgtgggcaattgctataggggtaattgaaattgcaatagccagcaaacttcgtaaagagataactaacgaatggctactaattggcagcggtattatttcaattatctttggtggttacctgatgtttaacccgggtgcgggcataattaccctactttggctagttgcaagctatgccatcgtgtttggtattatgatggtgttgctagccttcaagcttaaaaaacttaatgaacaagcataaaaaaagcggctaagccgctttttttatttttgactattacgccttgttagggcaatttcaccatcgatatgaatatcgcgctgtgggaaagcaatggtaatgttgttttcagcaaatactttataaatgctaaaacgcagttcactacgcacttggcgaagcggtgcttctgattcggcacacacccaaaaaatagcgctaaaagttaaagagctatccgcaaagtcatcaaataacacagatgatgccggtgtttttaaaatggcaggatgctcatcaagaatttgcttcatcagcttttcaaccaacaccacgtctgaaccataagcaacaccaacattcacaaatgaacgagcattacggtcaatcaaggtccagtttgttacagtattctctagcaagtgactatttggtactagcatgtgcacaccatcgttacggcgaatacgagttgaacgagtattaatagtttcaacaactccttttgctgtacccacttctaaaaaatcaccaatacgaattggtcgctcccacattaatatccaaccactaataaagttattgataatgttttgcgcaccaaaaccaacaccgattgcaatggcaccagagacaaatgcaaacgccgtcagaggaatattgagtacctcaagtgaagtaaacaccagcaccgcgatggttacaacaaggtaaatacgggtgaataaatgaactgtgtctggccctaggttttttgccaacaatgcttttttaattaatcgacctatccatgtgaccacaaaccacattaaaaacagcaccagaggcacttgaattactttaagtacggtaatttgcacatcgttataggtgaacaacacaaacgataatgcagattgcagatcagcaaaggtcataaattaacattcctggtaaaaagagagtttgattcagttttgactaagtttagcacggcataatagggtaaaacttggtaaatactaagttctttatgcgcaaaatgcgctaattattaactcttttagcccatagctgctatatacataggtaaagcttgtaggtttagcaggctttgaatagcacgaggagaacacaatgtcacaaatgacactcacacaaaaacttgccactttacaaccactggttgatttaaacttatttgaatcaagtctagaatatcgcaaccggatcttgaacttacttgctgaacaagaacagacacttgcactaatcaataaagaatttggtaatgcaatgcctgaaaactttggttcagagaaaaagtttgtgttgggctacaactgatcaatgccagttaactctaacaaaaatctaatttggcaatcagcgccattttcaatttaagctagccatcacctttatttgatggctttttaaacactttatccctgaatcactcttttttgcggcatacttacctattaaagcgacaaacttgcttctttctacttataaatttgataagttagagaagatttatccacatttttggagctctcatgcgtaaaaccttagtagcaaccaccattgctagtgttcttttattatctgcttgtagttcacaacaagctgacactcaaactcaagttgaaacagccgctgaaacacaaacagccaatgttgaaaacattctttttaagccaagccctttacagtacatggcaccagagtttgataagctttcgactaaagactatgagccagcgtttgaagcagggatcgcacaacaaaaagctgaaattgcaaagattgcaaataacccagagccagcaacattcgaaaatacccttgttgcaatggaatactcgggtgaattattagaccgcgcttctgcggcattttttaatttatcgggtttaatctctgacagtgagtaccaacgtatcgccgcgaaaatggcgccgattatgtcagctcacactgatgacatttacttaaacaaagctttatttgctcgtgtacaaagcatttacgacaacaaatcatcactaaatgctgaagatcaacgccttgttgattactactacaaaaaattcgttaacgcgggtgcaaaactaactgaagctgaaaaagcaaaaatgcgtgaaataaacgcagagcttgccaagctttcaactgagttttcgcaaaacatcttaaaatcatttaaagaagatgtgattttagttaaagataaaagcgagttagcaggtttatctgaaggcgaaattgcaagccttgcggcagcagccaaaaaagcaggtaaagaaggctacatgatcacactagtgaacacgactcgccaacctatcttacaaagccttgaaaaccgcaagctacgtgaaaaaatttggactacatctgcaacgcgtgcacaagcgacaaatggccctattatcattaaagaaaccaagttacgtgcagaaaaagcagcattacttggctataaagattgggcttcatatgtgatgactaaccgtatggcacaaacaactgaaaacgtttacggcattcttgatgatttagcgccaaaagcggttgctaaagcagaagcagaagcagaacaaatccagcaagtaatcaaaaaatcaggtgaaacgtttgcactacagccatgggactgggcgttttatgctgagaaagttcgtcaacagaagtacgacttagacccagctttagttaagccttactttgaaatgcagtcagtgatccatgacggcctattctttgcgatgaataaactttatggcattacgttcaaagagcgaaaagatctgcctgtttatcacgaagacgtgatggtgtttgaagtattcaatgaagacggtagcgctatcggcctgttctatatggacccttatgcacgtgaaggtaaacgaggtggtgcatggatgagcgcctatgttagccaaagcggtttaaaaggcaccaagcctgtgatctacaacgcacagaacattcctaagccagctgaaggtcaaccaacactcatgactttctctgaagtaacaacgatgttccatgaatttggtcatgctgtacacggtttattctctgatgttaaatacccaagcttagcgggtacagcgactgcacgtgactttgttgaattcccttcacaagcaaacgaagactggaatattgaaccgacagtacttgcaaactacgccaagcactacaaaacaggtgagccaattccaaaagagttacttgcaaaagtacttgagtcacaaaagttcaaccaaggcttcgatactactgagtatttagcggcggcactgcttgatatggaatggcactcatttggtgttgatgctgatatcactgacgtacaaaagtttgaacatgatgcattagacaagcacggtatcgcgtactacccagtaccaccacgttataagtcttgctactttagccacacttttgctgggggttactcagctggttactacgcttatctttggactgaagtattcgcagcagatgcgtttgcacacatgactgaacaaggtggtttaacacgcgaaaatggtgacaatttccgtaaagagattttatctaaaggtaacagccgcgacttaatgcaaagctatattgagttccgtggccaaaaaccaactacagacgcactattaaagcgtcgtggtttagttgaataatcacaccgttatttaaagtatgaggggaaaccctcatactttttagttatttatttaattttcaccccacttttattcctattcacctcaaagcaattgtcagttaactcgtttttgctaatctcaaagaaaaacacgagttcacacatgaaaaacgctttacttttaggactttgctcagctttagctgcatgttcatcaaccccagatgagcgcgccgatatcgtgatagaaaacgcccaaattattgatatgcaaactggggctatcacagcaaagcaatcacttgccattcgcgatgggatcatcatcaaacgtagtgataaacctttaagtagccaatatcaaagctcaacatttattgatgcaaaaggtcagtatgtcatgccaggtttatgggatatgcatgtccattttggcggtggtgatgagcttattgaagagaataaacagctactgccactgtatttagcctatggcgtaacaaccgttcgtgatgctgcggctgatttgagtgaatctgttcttagctggcgtgaacaagtaaaacaaggtcagttagtgggcccaactatttttacctctggcccgaaattagaaggtaaagggtctatttggcccggtgatttagaagtagaaacaaccgcagaaatgcatgctgcaatggatctgttagacagcatggacgtcgattttatcaaaattaccgacagcgctttaacgcctgagctttatcttaaggcagtaaaagaggtcaaaaagcggggttaccaaatttcgggtcatattccattttcattgtctgtgactgatgtctccaaggcggggcttgatgcgattgagcatatgacctatatgcttaaagctgcggctaaaaacgaagcggatatttctgcaaaggttgcctcaaaagagctaagttatcgcactgcgctgcctattatcaccgcgcagtttgatgaaccaacagcaattgagaaatttacagttcttgccaacaataacaccgccgtggtgcctaccttgattggtggcaaaataacggcttacattgatgaagataatcatcaagacgatgcttttttagattatttgggtaaaggtttaaaagcaacttaccagtggcgagtcgatagagctaacaaagacacgcccgcacaaatcgaacagcgcaaagagcgttttgttaaaaccgcacagttactccctatcgcgcagcaagcaggtgtgagcattattgcaggcacagatgcaggctttttaaattcgtatatttatccggggctttctttgcaccaagaactgagtatttttactgaatatggcctaacaccactgcaaacactgcaagctgcaactcttgcggggcctgagtttttaaataaacaacagcaatacggtgcacttagtgaaggcaaagtagccgatctcattttgctttcagaaaacccacttattgatattcgtaacacacaaacactaagcggtgttgtctcgcacagcacgttttacgatagcaacgcactcgagctattaaagcaacaagccaaagcctttgttgccagccaaccctaaccccccattgcccatgaccacgtattatccgtcatgggcaattttaattttcagccatctcatatacactgcccttttttgcacataactcgaataacatgacctacttatttgctgtaaccctgctttgggccttttcgtttagtcttattggtgtttatttagcaggccaagtggatgcatggtttagtgtgttaatgcgcattggcttagcaacttgcgtgtttttaccttttttacactggcgtaaaactcctaaagccttagcactaaagctcatggcaataggcgcagtacaacttggtgtgatgtacagcttttattaccattcgtttttgtaccttagtgtgcccgaggtactgctatttacggttatgacgccactttacatcaccctgttaaacgatttgcttgaaaaacgctttaatgccaagtttttattcgccgcattactggctattttaggcgccgttgctattcgctatgaaggcgtcgatgaaaactatctcattggtatgctaatggtgcaggctgctaatatttgctttgccactgggcaagtaacttacaaacgtttaatgcaagatcagcaactcccccactctcgggtgtttgcttggttctttattggcgctttaattgtcgcactgatttgttacggcttatttggtgataccagtaagctgcccaccactactacacaatggggcgtgttaatttacttaggcacgattgcttcagggcttggttatttcgcttggaataagggcgcaactattgtcaatgtaggtgcgctggctgtaatgaataacctactgatcccagcagggatcatcgttaacattgttatttggaaccgtgatgctgatatcatcaagcttgccattggcgcagcgattatcttattagcacttattataaatcagaaacttaataaaactgccatggagcaatgataggctaaactctattagattagaggaatgctgttatgcgcgcactggttttatgttgtttagttttcgttattcaaggttgtaagaatctgcctgatgagcaggcagtgcaagtgggtgctaggccttactatttaatcgacaagatgacagatgggccgttaaagcagcaacttgcggcatgcggtaatggccctttttacaaaactgattttgtaattggtcatcgcggtgcccccatgcagtttcctgagcacagcaaagagtcatatttagccgctgcaagaatgggcgctggcgtacttgaatgtgacgtcgcctttacaaaagacaaacaactcgtgtgtcgtcattcacagtgtgatttacacaccactaccaacattttagcgattcctgagctcgcagcaaaatgcagccaaccttttaccccggccaaagacggccaaccagctcaggctaaatgctgcaccagcgatatcacccaagctgagtttttaaccctaaaagctaaaatggatggtgccaatgcaaatgccaaaacggtcgcagagtatatgcaaggcacaccaagctggcgcactgatttatacgcaaacagtggcaccgtaatgacccaccagcaaagcattgagttatttaaatcactaggtgtaaaaatgacgcccgagctaaaaagcccagaagtcagcatgccatttaacggttttagccagcaagattatgcgcaaaaaatgcttgatgagtatcgagctttaggtgtgaatagccaagatgtttatccgcaatcatttaatcttgaagatgtgaagtattggcgaaacaatcaccctgaatttgcaaacaacagtatttatcttgatggcagagatgagcaagcacactttgatgcgatggatgaaacaacttggcagccatcaatgcaagctctgtataacgatggagtacgcattatcgcaccgccaatgtggatgcttttaagccttgatgagtcaggtaaaattgtgccttcactttatgctattaaagctaaacaagccgggctgaacatcattacttggagtttagagcgctctggtccattagataatggcgggggttattattaccagtcaattgccagcgtgattaaacaagatgggcaaatgatgaatgtaatagacgtccttgctaagcaagtgggtgtgatggccattttctctgactggcctgctactcttacctattacgcaagctgtatgcagtaccctgcctcaaaaaattagctgagcatcaataaatttcaagggctttgactcgtccaaaaggtggggctgaggtattattagctaaaccgattttacaaggattaacatgattattcagcaccatagccacgacatagcgaccaacacaggcgcaatgcgcaccagcatttatcgtcctgtagaagaaggtaaatacccgtgtgttattttctattctgagatcttccaagaaacagcgccgattgcgcgctctgctgcaatacttgctggtcatggctttgtcgtattagtgccagaagtttttcatgagttaaatcctattggaacggtacttgcctacgatgatgcaggtaaagacaaaggcaatgccgacaaatgggcaaaaccgcttgagagccatgactcagatactgacgctttaattgcatttgcgcgtcagcaagattactgcacaggaaatgtaggtgccatgggcgtatgtattggtggtcacctcgcgtaccgcgctgcattaaacccaagtatcaaggccgctttttgtttatacgcgacagatatacacagcgataccttgcctgcacaagcgggtaataactcgtttgagcgcatggcagatattaaaggtgaaattcattttatttggggtaaacaagacccacatgtaccaaaagaaggccgccttaaaatttaccaacaagcggtggcaacaggaattaattaccagtggcaagaggttaacgcccaacatgcctttatgcgcgacgaaggcgaccgatacgacccagcccttgccatcagcatgtatcaacaagccgttgctttatttaaccgcacgcttgtttaaatcgtcatagtagctacttgattagtaaaataatccttcaagtaatcaagtaaaacccgcagctttttacttcccgccgcccctggcgggaatacgccataaagttcaatatctgcggttttgtaatcatctaagattgtccgtaacaatcccgctttgatccttggcagtgcatcataaacagggatcttcgctaaaccatgcccagcttcaacaaaagctgttcgcgcagcagcattattggtacttatgccaccactaacaggcacctcatagcggcgtttatctttttcgagtgtgacaatggcactacttggttgatacaccacccacgtatgctcagctaaatcggcaatgctctttggtatagggtattttgtaaagtaatcgactgagccacatatgcaggtcgccagacttgcaaacttagtggcttgtagatttgagctctcaagggctacgcctctaatcgctaagtcatagccctctttgatgatatcaaccacatcatcactgagctgtaaatcgatatcaatttttggatacaaacgcttaaactgggccagtgccggtaccacaagttgtaagccaacattcaccggacaactcaatttaataaccccaacgggctcactctttaagttttcaaggtgtaagttagcagcctcagcatgctcagtgatagcctgacaacgttcgtaataagccattcctgcttcggtgagggtcatggtgcgcgttgagcgattaagtaacgtcagctttaattgctgttctaatttctttaagtggtaactgacaacggcccttgataaaccaagttgttgagccgctttagttaagctgccttgctgcacaatatgggcaaacaccaccatgctttttaattgctcaaacgatactttcatacaaactcctaatctaacctgaataattgtatcaattattaaaccaatgaagtcaaatttatctgcgttgtttaactcgattttcacccctatagtgttattaacgatgtttaataagcaaaaaagggattcactatgtcagctaagaaaattttaatggtacttacttcacacgatgagcttggcgataccggccataaaacgggcttttgggttgaagaatttgccgcgccctactacgcctttattgatgctggtgcagaggtaactttagcctctgttaaaggtggccaacctcctattgatccaaacagtgcggcacctgatgctgcaactgatgctacaaaacgctttgatcaagacagcgcagcacaaaccttaatggctaatacaaaacctctggctgacgtaaaagccagtgattacgatgcggtgttttacccaggcggccatggtccgttatgggatttagttgataaccaagattcgatcaatttaattgagcaatttcttaattcagataagccagtaggtgcagtgtgtcacgccagtgcagtattacttaatgcgaaaaatgcagctggtaaatctgttgtgtttgataaaaaagtaactggctttagcaactcagaagaagacgctgtacaacttaccaatgtagtgccattacttgttgaagatgagttaatcaaacaaggtggtcagtatcaaaaaaccgatgattggggcgagcttgcgattgaagatggcctactaatcacagggcaaaaccctgcaagttcagagcttgctgcgaaaaaactacttaccaaattaggttaacccaagcctttagtaaacaccttgcttagcagggtgtttaccttcacttttaataagttatactcgttcggtcaccttgatttaagagcttctcatcatgactgaaaaaaaagctgtcaaacttcctcctatcagtagtaagcgattcgccattttaggcattatgctggtgtgcttggtactgcaaataattaataccctacccggcatcaatttgaatggtttagggattttaccaaggcaaatgtcaggtctatcaggggtgttttttgcgccatttttacatggtggttgggcgcacctttttagtaacctagtgccttttgctattcttgcatggctagtttgccaatttagcgtaaaacgcttttggctggtgtttgcaggcacagcgcttattggtggattactagtatggctatttggccgcagcaacattcatgttggactaagtggtgttatatacggtttatggggctacttaattagctacggcattatgcaccgttcattcaaagccattttaatcagtattgcggttgttgtgttatacagcggcctaatttggggtgtattcccgcagcgcatccatatttcattcgaaagccatttattcggcgcaattagcggcgcattcatcggttatattatggcaaaacgtgataaacataagaatctgaagctttaaacttaaagcttctagcttctcagcttcattgtcaccatcacaacgccatggtcggtgctttgatcatcataggcaaattgcgggttgatcaagtgctgatcgtaggtgtgataatccaccacttcaaaaaaactgctctgaaacccagcatcaaactctcgagataacaaaatataatcaaacactgagctgctactgccaaaatagtgggttgcttctctatcattttcgattacaacatggcgctgatacagttgccaactatcttgtagtttaaactctgaacgagatgggctattttgcctatgaccgctaaagcgaagatgatcagctattaggtggttaagcacgccatcgtgtaactcattattaaaatcccccattacaatcaccgggttattgctgtgcgctctgcgtttaatgatttcaacgagtaacaatacggcttcactgccacgctgtatgctggatgcccagcgcccaagagcttgtgattttaactgcataactaagttttgctgttcactgtggctttcatcatcctgatgaaggagcatgctgcgctttgatttaaagtgcaccacatagcaatcgacgtgccctaagtgaggtacttcaagtgtcgcgcgaataatgcggcgactaaagttgaaattagcgcttaagcccatggctaaagcatcatcttgctctgcctcaacctgacttacatcgacaattttataacgtgaggcaatcgcgacaactggatcgcgataaataaagtcatcaataacagttggctcatcaactactgcaaaataggggtaaccctctgcgttaacttgttgtttcagttcattgatactgaacacttcttgaaagccaataatgtctggctgctgatttttaaggtaatcggccaaccagcgctgctttttggcccattgctcagcactataaatacgctgaaaatcataaaatgcgtcaggtggcgctaaataattatataaattaaatgttgcgacctttaattgattatagtctgtcacttatgtccttgttcatatagccattcgcgagcgattgttgcatcttcaaaatacttaacttcgccactggtaaaccaattaccaactttactagcaacttgttgccattttttattacccagtaccgcaatgcgacaaaactctttgttatgttttaagccaaatttaaaatcatcccacgccgcttgtaattcccatccttcaagctctgttatatctacaaacactctcattttgacccgaggcaccgaagcaagtgcattatcaaccagtggcgttaaggtcgaataatcgtcgtgagtcaatttacccaccacttttaaggtaaggtaaaaggtagtgcctgttcgctctaaaccaatagctaagccatgctttttcataacagcctcctgaaaattatttaaacttaacaagttaacaatatcgacataatactattttataactctacttcccttgcttaggttgatcaactaggatggtaatctcgtaataacattcattaaagcacaatttagggagtttcaatgagtaataccgacagttatacgccacctaaagtgtggcaatgggatgcagaaaacggtggtgaatgggctaagactaatcgcccggtctcaggtgcgacccacgaacaagacttgcccgttggtaaacacaaccttcaactctactcacttgcaacaccgaatggtcaaaaagtcaccattatgctcgaagagctattagagctaggtattgatgaagccgactacgatgcatttttaattaagatcggcgatggtgatcaattctcttctgggtttgttagtgtaaatcctaattcaaaaattccagccttaatggatcacagtactacacctgttactcgcgtgtttgagtcaggggctattttacagtacttagcagagaagtttgatgcactgatcccaagcgatcatactagtaaaacagaatgtcgcaattggctgttttggcaaatgggttctgccccctacttaggcggtggttttggccatttttatagctatgcaccttataaaatgcagtatccgattgaccgcttcacaatggaagttaaacgtcagttagacgtgttaaaccgtcacctaagtgaccatgattatatggcgggcagtgaatactcaattgccgacattgctatttggccttggtatggcagcctagtgcttggctatttatatgatgcagctgagtttttagatgtcgagtcatatagtcatgtaatacgctgggcaaaacaaatcgaacgtcgccctgccgtaaaacgtggtcgccgagtaaaccgcacatggggtgatgaagctgaacaattagctgaacgccactctaaagatgatttttaagggcttaacggccctttttcataaatactaactatatgaaaaaactcagcaaagaagacatataccaacgccttagtaacaccgaagatgcccgtgcctgcaaagcaattgatgaggcggcttgtaaagtcgtacccggcaattttattaccttattagtgagccaactatttagtaagtttgccgatgccttgttaaatccaaaggtaaccctgccttggctgttacaaagcattaatgtgccgagcagttttattgcttggcttgtgcctattcgtgaatcaggttctatgttgccacagctggcgatagcaagtgccattcgtaagctgcctgtcagaaagtgggtgtgggtaattggcgcgattgtgcaggctttgtgtattttgggcatgttggtttgtgctttgacgctgcaaggtacaaacgctgggtttgctattattgctcttttgattgtttttagccttgctcgcggctttaactctattgctgcaaaagatgtattaggtaaggttattcctaaacaacagcgcggaggtataagtggtcttgctgccagctttgccggatttgcaacactcaccttcggtcttggtttgtggtatctacaaagtcttggttatgagaatggagtgtatattgcactgatgctagctgtgcttatgtgggttttcgcagcgcttagttacagtcgtattaaagaatacaaaggcgcaacagaaggcgctgaaaacggcttgctacatgctcttaaaaaactaaaactgctttaccaagacaagcaatttgcacattttataattactcgtgcattgttattgtgctcggccttgagcgcccctttttatatcgtacttgccagtgaacaagctttcgacttttcattgcttgctacgtttatggcgctatcaggactagcaaacttagtatccgctcctatttggggtaggctcagtgatttgtctagtcgccgcgttttagtgcttgctgcgatactcgttacttttaatggctttgctgtttatttggttgcttacttaagcccatccactctcaatgagttttggttattaccactgtgttattttttactcactgtagctcatcaaggagtacgccttggccgtaaaacctatcttgttgatatggcagaaggtaacaagcgtacagactatgtctctgttagtaatacagtgatcggggttatcttactgttacttggcagcgttggcttactaaatgcgtacttaagcaccgccgagcttatattattttatagccttttaggcttggtaggtgctattagtgcttggtttttaccagaaacttaattcaaaaaggcgaccaaagtcgccttttctcttcagtttttcaaattcttatcgaagaactctaaaaacgctttcaatgttttaattcgatacggctgatgcgacaaatagtggtcaccatcttcaagctcaatataggttacgtctttgccttcgtctttaagctcatcttccatttctcggctatgataaacaggcaccacgttatcatcagaaccatgaacgagtaacactgggcgattaatttgttttgcaaaattaactggcgagaccttttctaatttatcgccatcagtaccaaattgcttacgcacaatttctttattggtgaaatatcgtgccttactaacaatacgctcaagatctgtgacaccagcaaagctggccgcacatttgaatgtttcagggtgcttaaccaccgccattagtgcggcataaccaccataacttgctccaccaatacagattttatctttattagcgataccttcaccaacaagccaattcgcggcatcttgcaagtcatcttgcatttctttaccaaaaccttgtacagcagccatttcaaattcatgaccataaccacttgaaccacgaaagtttggttgtagcactgcataaccattataggcaagcaacgcagtccaatagtcaaagtctgcgtaatcacgagccattggtccgccatgtgggaacacaatggtaggcaatttatcaccttttttataacccacaggtaaggttaaatacccttcaatagttaaaccatcacgggctttataactgattttctttttaccgctgtaaactgtgtcatcaatatccggaaatgccgatacaaatactgttaactcgttcgtatcacggttacctaacatataggtgccggggatttgctcacctgtaaccaaaaccacatattgacgctgatctttgctggtatcaataatatcaatatcaaacttatctgctggcagtacagcgcgtaagccattataaaggttgcttaaatcttcatcccagtaatggatcccctcatcaagctgtgagtgagtaaaccctgcgacttcaccagttaaaggtgaatagaatatatgaccgtcgaagtcagagttatcatcgctaaacactaactcttttttcatggtcgttaggttcattttataaagcgcatcgtagccatctttaagtgctttgtaataaataatattagggtctttatcaaagcccaaaacacttactacatcagggctaaatgctttatatttgaataatgttttacgtttatctctatcttcgtcatatagaatatattcaaattcgtcttcatccattttaagggcaatacgtacattgccttggcggtcaataatccaatcggtaactttgttgaatgaacgctgcactttctttttacgaagtgtatataaatcaagttcatacacacctggcgcattagcaaaatcaaagtcaccttgaactaagattttgtcttttttactcggtaaaaaactgatgacctgatcgccaaattgcggttggcgcttgtcacgattaaagtctgcttcattggctggtctaactttgcctttatcgttaatgttataagcatacataaaagttgttgaatattttgggccaccaaattgacgttggatacggcgtgcacctatcaacaaaacttcatcattcgcccactcataccaatcaaagaaaatagtgtggttatctgagcggatcagagagttgacttcttctgttttacggttataaaccgttaacaccaactctccatttacatttcgaataaacgatagatgactaccatttggtgagagctttacttgactaaaagcccgtaaagaggcgaatgattctacagggagttgcgtgttttcagcagcacggggcattaagcttagtaccgaaaatagtgaaagcagtaagtacttcatcataaagtccatttcattttttactgttcctaaataataacattaaaagaaaataaaagactatgtaagaaatttcacctctgacaatcattcgtttaaaacgaacaaagtactcgattaaaagcattattaatttattttttgctaattataatgactgcacaaattcagttttcttaggtgacatgatgaaaaaagtacttgtgttaaattcatctttaaatggtgaacaaggtaattcaaccaagcttagccaacaatttgttgagcagcttgctaacaaccaacaaatttcagtaacaactcgcgatttaagcgacaatgccattgctcacttaacgcagacagaaatggctgcctggatgactgatgcaaacgaacgcaatgatgaacaaaaagcacttgctgcaatatctgatgatttaatcgctgaacttaacgacaacgagttaatcgttattggtatgccaatgtataactttggtattccttcgacatttaaagcttggattgatcgtattgcccgtgcaggtattacctttaagtacactgagcaaggccctgtaggtttagttgaaggcaaaaaagtagtggtacttgcagcgcgtggtggtatctatcaaggcaccgacatggatacacaaactaaatacttaaaagatgtacttggttttgtgggtatgactgacgttcactttatttatgctgagggcctagcgatgccagacgcagagcaaagtctagaagcagcgaaaaacgaaatcaacacatttgctgcagcactataatcagcaaagtataaaaaagcggtcatcatgaccgctttgtgatttacgctgtgaccgataacagcgaatcaccttcagataaagcaaacttttcttgcacagaggctagaatcgcttctttatcttcttctcccagttgatcagaatattgcgctaacaactcatctaaataactgacaacctcttcagtatcaacctgctctagtgagttaccacttggcggcggtggtggaccaggcgggcgttcaccttcaggacgacctaattcaccgacttcagcggcatcaaagccagcttcagccataattgcttccatttcttgaccaggttgaatacctgcgtccataaatgtttgcataatggattgtgcatcttctgcagttaagttttcaggatcaaactgagctaaggtttcattcattaactctgtttgttcactggttaacggctctgcttgcggtcgttgcatgggctgaaaattcgcactcgatgaaacactgttgatcatcgttgattttccttacgttttggtggtttatgtttgttgaactcgtcttcagttacttcaccattttgatcagcatccatgtcattaaaaatggtttgcagcatatcttctggcacaggctgctcactaaactcagtaaaatcaatcaccccattgccatcaatgtcaatcgtcggaaagtcaggtcgtggaggtggaccgccttgatggtcgcgagcaaagcaagcgggcgctgtggctaacaatgaaatagctaaaacagaaagtgcagataaatgcttcatagcgaacctcttatgtcattcaattgaccgtaagcataatctgaatgccaaccaaaagtgtgtgggtaatatgcaacaaatgtggaaactttgtggattgcgttagcaattaatcgaagttgtaacttgttacgtatgaaaagcaaaacaattttccaacacaacgattatggcaagctcaaataagcaaaaagtgaatcttgtttggttcaaacgtgacctaagactttctgatcatcaaccacttgccaatgcgattgcatcagacctgccctgcatactgatttataactttgagccactgttgctcgaagacccccattacagcttaaggcactggcgttttgttgctcagtcacttaaagacatcaaccaacaactcgaaaaatacaacgctgaaatcgccatttataatcaacagataattacattgctagaaacactcaatgacgagtttgaaattgctggagtttatagtcatgaagaaattgggctttacaacactttcgagcgagataaacaagtaaaactctggctaaataataaagctattccatggcatgaaacgccattaggaggagtaaaacgagcacgaccaaaacagtttgattggcaaactcattggcacgaggtgatgaaccaacctctcgtaaaaccaaattggcaagcttttaaagccgtactacctaataattatcaagcagcagagtgttttgacgattttctaaaccacgatcctcagtttcaatatggcggccctcatgaagcaagagcctgtcttaaaagctttatagaacagcgagctaaaggctaccaaagcggtatttcaagcccatcagaaagtagagattcatgctcaagactctctccatatttagcatgggggaatttaagcctaagacaggtttatcaaacattgagatactacctaccaaaacaacctaaaagttggcgacgttcattgcatgcctttgagtcacgattacattggcattgccattttatgcaaaagtttgaaactcaatgcagcatggagtttgctccgcaaaacacaggctaccagcactacccttatcgcgatgatgatcaccttgatgagcacctaaatcgctttgagcaaggccaaacaggcattcctattattgatgcctgtatgcgctgcctcaaagcaactggttacattaattttagaatgcgcgctatgttagtcagctttatgacccaccatatgaacattcactggcatcctgttagtttaattttatcgcgttattttttagattttgaaccgggaattcattacccacaaatccaaatgcaagcatcggtcacaggaaccaacatcattcgtttatataacccaataaagcaatctgaagataaagacccagatggcatatttattaaaacatggtgtcctgagcttaaagagctgcctgtagaagatatccaccagccatggcaactgccgccaatggaagctttgtttaataactttaaaccaggcgaagactaccccgagcctatggtcgatatagaaaaggctgccaagcaagcacgtgagcgattatggtcattccgagaacgtaatgatgtaaaacgcggcacaaaagccgtactgcgtatgcatgtgattagcctaaaaaggcaacgtcatggcacataaaaaacttaatttacccagcaaaacctgtcccgtatgtgacaggccatttgtgtggcgtaagaagtggcaacgagactggcagcatgttaaatattgctctgagcgttgcaagcgcgaagcgaaaagaaatattggcgtttaagttgcaattatatcgttaactcacacttttcggcacgaaaccctgaaagcttttcacggtcgtcgaaaaatttacaaaggagatgacgatgacgattaaaaaatctgcacatacaagttggtctggtgatattaaatctggcaaaggctacatttctagtgaaagcggtgcacttgataaacagccatttggctttaacacccgctttgaaggcaaaccgggcactaaccccgaagaacttattgctgctgctcatagtagttgttttagtatggcactgtcgctggcactaaccgaagcagactttgtggctgacgacataaccaccaaagcaaccgttagcctagatgaggttgacgatggcttcgaagtaagccatatcgcactagatgtaagtgcgaagataagtgatatttcgactgaaaaatttgagcaactttgtgagcaaaccaagcaaggctgccctatttctaaactgatgaatgctgagatatcactcaccacaaagcttaattaatcccgttcggccaagcactgcttggccttttcatattctaacaggcccacaacactttattacaatgtaaattcctgcttgttgtattatctttatggaacaaaaaccaaatacaacaaggatatgtatgtttaaacaactagcccctattgcacttgcaacgctcgcttattcaagctattcaacagccgcaacagagcaacaggtgagtaaacagtggttcaatagtatcaattacactcacgtagaacatgacagatatagctttaatggctaccaattagcaagccattattactttgaagagcagcagagctcaggtgtgctcgatgattatggctacctagatacagattcaaacatcctagtcaattactcaggaggagactattacaatgacattggtatatttggcgagtattttttaaataactggtttgctgtagccgatataagtgatgtgagggatttagacaattacactctaggtataggctacttatttgccgatgccttaaaagtttctgtaaatagggatgtgcgtgaatatggtgatgattatttccgcttaaaagcgcagtataacctccaaatcaacgataaggattaccttggttttagcgcagaaacagatgatgaactcgacgtttggaatctctcggccagatactttaatcacttaagcggcagccattacattaccgttgatgttggccatcaagacagcgttaatgattcagcaagtaatgccatgatcagctattactttggcgaacactatgccataggtgcaggtttggatgattctgaactcgttttacaaggtaagtactttattaatgaaaaatattatttaaccgctaattacactgaaagcggctcagctgaactctacaacctcaagtttgttgcccaattctaaacagtaatgagtcaacagttttaaacaaaaacgccactttaaaagtggcgtttttttgatatacagatactacatattacctagcttcatcatcattgcagtgtacatttttaagttcagcgctaactgctcttcggtaataaactcatgttctgagtgacctgtgtactttttacctggcattgatggaccaaatgaaacagcattatcaaatagcttcgcattggtgccaccaccgattgacacaaagcccgcgtctttatcgcccgtaaaatgcttaaagatatcaagtaaagcttgggcgtgaggtgcaccatctaacagcattggcgtaccaattaccacttttgtgtcttttaacgtgacattgttagaggtttgccaagcgctaagtgcttcattaatttgctgtttgagcacagctttttgtttaccaacaggacggcgcatattaaccgacaatttaatatcgttaccatcgcggcttaataacgttggcgaaacagtcatcggccccataaaatcatgcttgtaagcaatttcaccgaattgcgcgccatataaatcaaggccaattagctgattaataaactcaattgcttgaccatcgctattgttctcaaggtcgatgcctttgaagatttctgcaagatacgcaatggcattttcacccgcttctggctcagatgaatgtgctgaaatccccttcacttgcactaacaagccattatcttgctctgtcatcgccacttttacgtttttaagcttagcgacattgtcgtgtaatttagctactgtcgcagcatcggcgttatgcacaagcacactggcatcttcagggatttggctaacaaaagcaccgccttttaaattacttacatataagcctgtttttgcagaggttgctgaaaaagtcggcgcaattaagctccagcctttttctgcaacaaccacagggtatgaagcatcaatggtgacagcatattttggttgctgataggttttcataaactcttcgagtggtgcccagtcagactcttcagcaaggtaaaccattaattcaatgcggttatttaaagtaatgccgttatctttaatcgccttcattgcatgcaatgctgtggcaatagcacctttatcgtcttctgtaccacgggcaattagctttccaggttcagaggttttatccattttaaatgggctttgctgccatttactggcatcggctggttgcacatcaccatgggttactatggttactttatcagcttggttacccatgccaattaacactgtgtagcctaaatcttgataatcaaaaccaaactgcgccgctttcatttttaagaacgacttaaagccaatgaaatctgggttatcaggagtcgctaaaccttctttattcaccgttgggtaagaaactaaattctctaaggtatgaatttgcgcttgttgatattgctctaccgcgtagttagccagcttttcactttgctcagacacatcagcctgactagagaaggcagttaataagaatgcagcaactaatgaatgtttcaagataagctccagagtttaaaaagatttttaaaggtactcgttaattgtaacgattctgactaggacatgatatctctaatttaagtaaaatgtatcgcttaaaaataacaacaaggtacaatagccattcaccctattaattcgtttgttagactcatgaaccgcagaaaaaagatcttcactaaacttaagcaaaaagataagcgcgccaatgcaaaattgcataaaagcaataagccggcatacatctcaaaggcagatcgcgaaaaattagcacagcaagaagctgagcaggaaaattaaaatacccagcggtaagattgtaggcgcgattttatatcgcgcaacacacaaagacatttatttgcacaaagaggattagaggcgctgcgctctagagaatacaataagtaatctattgttttacctcattgtcttctcattcttttctctttgttaaaagacaatttgaaccacagagaacaccgaggcgcttcgcgctacacaaagaaaacaatatttacaaagagattatggtctctccttatcttcctctgcgttctctgtgacctctgtggttagaaaaaatctttaactcacaaagaggataagaggcgctgcgctttagaggaaacaacaagtaatctattattttcactcattgtcttctcattctgttctctttgtgaaaaagacaatttgaaccacagagcacaccgaggcgcttcgcgctacacagagaaaacaatatttacaaagagataatggtctctccttatcttcctctgtgttctctgtgacctctgtggttagaaaaaagatctttaactcacaaagaggataagagacgcttcgctttagaggaaaagattaaactgacttctatggttacctcattgtcttctcattctgttctctttgtgaaaaagacaaattgaaccgcagagtacaacgaggcgcttcgcgctacacagagaaaacaatatttacaaagagataatggtttctccttctctttctctgtgctctctgtgacctctgtggttagaaaaaatctttaactcacaaagagggtaataggcgctgcgctttagaggaaaacaacaaagtatttagttaactatctcacccaggttttgttcaagaggcttctaacgctttctctgacttaaaagcagctgttacaattcctgaatgttaagcaaaatgcgcaatttcaatcaggtaacgacttaccggccatggcaaactggccccacttctgaaaagcattaacgagtaaccatgaaaacgaagcaacaacaacgcattgagctggtctgtgactacattagccagcatcttgatgaacctttatcactggagacactcagtgaggtggcatgttgttcgaagtatcattttcatcgtttatttgccgctggagttggcctaagtgttaccaaatatgcgcagcttgcgcgcttaaagcgtgcctcatttcgacttgcatttgagcatcaacttaaaattattgatgttgcattagaggcgcaatttgatagcccagaagcatttagccgtgcttttaagcgcacctttacgcaatcgccaagcgaattcagaagcaaaccaaactggcctaattggcacacacagtttgaattttcattacctgacaaaaaggtttgccctatgaatgtaaacattgttgattttaaagcacagccagtggctttattaacccaccaaggcgctgctaataccctgatgaataccgctgcacaatttattgagtggcgcaaagaatcaggcttttcacctgttaaaaccagtaacacgtatgggatcccatatagcgatccggccaccactgaagaccatgcatttcgttttgactttgcaggcagtatcacctcaccgataactgaaaacccgcaaggtgtgcgaaatggtgaaattccagcaggacgctgtgccgtagttcgtcataatggctctcatgacaccattagcgatacagtttactacttataccgtgaatggctggtgcaaagcggcgaagaggtcagagacttcccctgcttctttcattatctcaacctcatccatgaagttgatgaatgtgatctgcaaacggatatatatttgccgataaaatgattgcgagtttcgaggcaaagaatgtaggcgcgattttacatcgcgcaatacttctatgattcacaaagaggataagaggcgcttcgcgctacacagagaaactcgactcctaatttgtagtaatttcttcacaatgtaaccaaattagcattgcattacctgaagaaattaaattaaagagtcattaaaattagttatccgtgttcattattcagtggctaaatttcccccaagtagtcacttattttttaaaaaattaaataaaattatttttcctgcaacttttttatctaaaacgcgtaattgctcttcgatacatcataattaagagagtaattaatgaaaattagtaaaatagcacgtttagttgcaccagccgttttatcgatgagtttagttgcttgtggttcaagcgatgataataaaacacaaccaccaacaccttcagagcccagcccgccggtaactgaaacagaaaccattgtatttcctgagcaatcagtagcccctcaaattgttacacttgatgaaaaaggggctatttttatcagtgagcaaggcttgtcactttatctttttgataacgattcacaaaataaatcgacctgcaatgcagaacaaggtgctgaagcaggaaaaagctcggataaaaacagctgtgcagcaatgtggcctccgttgctagcaggtgaacaaccttctgcgaacgatcagttttcaacatttgagcgtgacgatggtacttttcaatgggcatggaatggtcaccctttgtatcaatttgctgatgatagtagtgaaggcgataccaacggagatggtataaataatgtttggcatttggtccgccctaatccagttgcaatgactgcaacccaactagtcgctaatggagtggtattaagagcaacctctgcctctgaaactttagagcttgcgcgagaaaataaggatcaatttagcttatacactttcgatttagacgaaattaataaaactaattgtacgagcgacagctgtgtaaattcatggcctcctattatggctgatgcaggtgctcatctcgatggtaaactgtcgttagtgcaacgtggcgaacaaaaacagtgggcatacaatggtaagccactttatttatttgccaatgatgaaactaaagatgacaaacttggcgataatcttggcaatgtttggcacatcgcaacgactgagcctgcaacattcagaaccattgatgctggaacctttcttactgctaatggaatagcattaatactcgaaggcaatgaagcaagcgaagctaacctagatcaattcacgttatatacatttgataatgacaccgaaaacgcatcaaactgcaatgatgattgtgctgctacttggccaccatttttagcagatgaacaaagtaaagcgacaggtgattttacgatttttacccgagctgatgggtttaagcaatgggcatacaaaactaagcctgtgtacttctttaaaaacgacaccgctaaaggacaaacaaatggtgatggtttagccggtgtgtggcatgttatttctcctactgttgataaagctccacccgttacaagcacgcaatttatacaaaaggaaaccagcttaggtcaaagcatttcagtatcgggtaatgttctggtgttgttaagagatgaaaacggtattctcaccccaacaatgcaagataaatctgattttgctttatatatatttaatgttgatgacatcaacatatcaaattgcaattccgatcaatgtattgatacatggccgccgctgcttgctagtagtgaagaccaagcaaacggcccatacagtattatcgatagagctgatggctttaagcaatgggcaataaacggtaaaccactttacttttttacacctgatactgacgcgcaaacaactgctggcgaaggtgtaggtgatgtttggtatgttgcacgcccagctcctattcgcttacttaaccacgatagcaaaggtacattctttgttgccaactcaccaacagaaaatagcctaggtaaaaatgcagaggcactaaacaacttaactctatatacatttgatgttgatgtaaaagactctggagaatctgcatgtctgggcagctgtgcagctacatggccccctctttacgctaatgagaatgaccaagcaactggcttatttagcattatagagcgcagtgaagatgacggcagtcaaaagcaccaatgggcatataaaggcaagccgctttacttctttactgcagatagcaagttgggcgacacctttggtgactacgcgcagtggcctctagctcgccaataataaaaaattaaagccggagagtctccggcttataaaaggttttaataatgaaagtgcaattttttattttttgtttgcttgtattacaaatactatccggatgtggtgctggcgatggcagtacactcgatgctaatggtcaacttgtttcagagccaagcaatgatgaaccattgggtaattcagatgataataccccatcacccactgtaccagacacagataaagacacagcaacgcttagttttttacaagaaactattttcacacctatttgctccgtatgtcactctggggcaaatgcgccctatgggttacagcttgatactttagacaacacagctaaaaatttaattaatgtgcaagccgctggtaactcagaatttctgaggatctcgcccggagataaagaaaatagctttatttatttgaaagttataggtgaccctcgggccggaaaccgaatgccacttaatcaacccgcgctctcaaatgaaagtattacagcgatcggtgaatggattgataatggtgcaattatagaggctaatagcgcccctttgttcatcagtaatatcaaacaacaaaccatcaacaatatactacagataagtattacctttagtgtagatgtagataaatcaacactcttagcagatcaaattttaatatacgaagataaagtccctatgccttcacttagcgagctcgtatggaaaaataatcgcttagtaaatataaaaattcaaaagcctataagcgcatcaaccttacaactaacaataaatgaaaattcattgagctctgtaatgagcacatttggaaaacaattagacggtaacgctgacggtcaacctggtggagcattcaattatgaaatacgtttttaaactctttttagctgttatagccatcagttgtagtttgcaagcggtggctgagccatatatagcctataagaataatctcaagtgtggtacctgccatgtaaacccaaatgggggcggcctgcgaactagttttggtaacttatatggccatgccatgctacccgtagagcaactaaagttaagcactgctgatgtcggaaaaataaacgattacctgcaactaggcggaaatttccgcagtaaccttgaatacaataaagatgaaagcgatgtaaaaagtgaaaacgcttcgttcaggattgactctgcccagctatatttagcattaagctcaaaagaacttggaatgactttttatcttgatcaacaaatagcacctggggcagctgtaaaccgcgaagctttcgccatgtataagtttaaaaacaatcacttcataaaaatgggcaaaatgtatagcccttttggtgttcgtcttgaagatgattcggcttatgtaaggcaagcaacaggctttaactttgatagtagtgataacgggattgaagttgggctcgattataccaaaacaaccattaatctatttgtatcaaatggtactagctctgttagtaatgacgataataaatttttgtacggtgtgcgtgctgagcacctattcgataacatgcgaattggcagcaccttagttttaaatgatagtgatacatcccaacaaaagattctaaacgtatacggggcttacaccattgctaattttactattttaagtgagtttgactggatacaaactcaacaagatggcaatgctcacgagcagttggtagggttattcgaaatcaactatcaatggcttcaaggccttaatataaagctaacatcagaatactttgaccctaatacggatctcaatgaagaccaagaaacgcgattttcatttattggcgaatatacaccgatatcgcatattcaacttcgtgcgggaattaggatagctgatagcattcctcaatttaaacagcgaaataacgacaagttatttttacaaactcacttttacttctagcgctaacaggctccatttaaagcaatgtataatttgtattaaatggagccatggtaaataacatgaataaagaaaaactacctgacttaattgctaaagttgcattacgtgaccagcaagcatttagacaactgtacaagctgacatctggtaagttgctcagtattgcatatcgaattttaaataatcatgactgtgctaatgaagttctacaagaagcctttgtgcaaatttggtacaacgcgaatgagtttagagccgccaaagcagagccatttacatggatggcagctattgtcaggtatcgatgctatgacagaatacgcagtgaaaataggcgtattgaaagtaaactaacaaccaatccgtttgaagacgaagaacacttaatagtcaatgatcaaaccacaacgttattatgcgatattgggcagcagctagaagattgtttaaatcaattagaacaaccacaaagggacagtgttttaatggcttactatcatggctttagccgtgatgaaattgctcttaaattaaaaaaaccattgaatacagtaaagtcttggttaagacgcggattaacgaggttacagctatgcctagcacaataaaacgctatcaaaatcaggctttaatagagcatcttgcacaccaatatgtgttgggaacacagcccataagagttcgtaaacgcattgcgcgcctaagaatgcaatacagcgccttagatcaacgcatagactattgggaacaagcacttgcaccgctcaatgatgaaatacctgaaatgactcccaaaaatacaacctttatggcgattgagcagcaactacaactaaacccaaaaaagaaatttagtgattggtttggaattggtttttatcaagcaacaactgctttctctatcttaattttagcgcttacgttacagctaccacagacacgcactgaagctgatccattaagctatctagctgttatgaatgacaaagctcaaaagccacaactggttgcagccacatatggacaaagtcgtacactatctattgagctactcgatataccaaaggtacctaacggaatgagtctggagctatgggtaacctcaaaaacagacaaacaaatacgcagcttaggtgttattcccaccgatagtaacgtatttaaccgccctcttagtgagccagagtggcgattaataaaagactcagaagatttgctgttgaccttagaagaaaaaggcggttcgtcgattggtgaaccaatggggctggaaatatccaaaggtccttgtattagaatggctgggtggcaagaaaattcatgattaaatatttaactgcacttgctgtaatgagtagctcttgccctatcatggcaaatactcttgactatgatgcaagctttcgctttcgccaccaacaggttaatgatgattcattgaaatatgccaaagcaacaaccttattaacccgtgtcgaaggtcgttacctaactgataacgatctcaccttttttggtcaatatgatcatgtttgggcgctagataaaaacagctacaactctattacctattttaatgatcatggaataatcccagatccgccgggaggggagctcaatcaactaaatgttaactggcaatttttagtcaattggcgcgcaagtattgggcgtcaggttattagttttgataatgagcgccacattggtaatgcagcctactggcaaaacgaccaaacatttgatgctgcaagtgtgcagtataacaatgggtttaattggcaacttaattacagctatgtaaacaaagcccatcgtatctatggtgatcacagtattgctcagctgccgagctcagattctcgttacccggaaactcaaatacgtccaaatagcgagcttggcaaccaccagcacaatacgcatttagttaatctagcttatgtcgttaacccagctacaactcttagcagttttgtttatctattagataatgaaacagccgctgagttttcatctaatatcgtagggttacatctagaaggtactgtaaaaccagataaactaaaatataactatactgtggaaatagcgtggcaaaccagtgctgctaaaaaccccactgactatcaagctagatatttactaacggagcttggggttcaatatcgaagtcatcgtctagacattggctatgaatatttaggtgatgataataagacagtttttcaaacaagcttaggcactaatcataaatttttcggatgggctgatgtgtttggcgcttacaatggaacatccggtttaagtgatacttatttatcgtatgcaggccgaaaagcgaaaatacgttggaagattgttacccatagttttgagtcacttgctaacagtaaaacattgggcaaagagctcgactttgagcttgcatggcgctacacacgtaaatgggagtttaaattgttagcagcttattacaaagcgaatgaaagcaatttatacactaatccgaaaaatgttgatttatctacgattgaagtgtctaccgcctataacttttagatagagtataagctcactatatcggcgagcttatactttcctgctatgatattaagtattatttccaatcatcggcattgccatcgtggctgatcaccacaccgtcttgttcatcataaaagtcatacaattcatctggcatagggttttggcgaacatctaagaactctagtttatcaaggccactaatttgcaaatcaaccagtttattatcaaaaaaatagcccatttttaagtttttaagtgctgatatatcgagagttttgagttgattttgcatcattcttactgcctgaagcgaacttagtccagacatgtcaagcgtctcaagttgatttttgaataaataaagtttttctaatctattcaatgagctaatttcaagtgcatgcagttgattattagctaaatttaataactttagctttgataggttagttagatctaatgactgcaaattattattaaaaagtgataacgagtgtaagtttatgaattggttaacctcttgagctttctcaattcccatgccatggcattttatatcgctaaattgttctacatattgccattttctctcgcttgcaactgatttgatacaatctttaaacgcgttgtcctcaaatgacaaagaatcaaccggagtgttagcaaatacggcaaaagaaaagaaagaaaagaaaccaaataataccaacttcatttttacctactttgacaacattaactttaacatcacaatcttaacctatacgtttttatcattacaatataattataaaacagacttttatgattacctcattgtcttctcgttcggttctcattgtgtaaaagacaattgaaccacagagtgcaccgagacgcttcgcgctacacagagaaaaagtatttacaaagagataatggtctctccttctcttcctctgtgttctctgtgacctcgtggttaaaaaaatcttttacgcacaaagaggataagaggcgctgcgttttagaggaaaagattaaactgacttctatggttacctcattgtcttctcattcagttctctttgtgaaaaagacaaattgaaccacagagtacaacgaggcgcttcgcgctacacagagaaaataatatttacaaagagataatggtttctctttctctgtgctctctgtgacctctgtggttagaaaaaatctttaacgcacaaagaggataagaggcgctgcgctttagaggaaaacaacaagcaatctattattttccctcattgtcttctcattctgttctctttgtgaaaaagacaaattgaaccacagagtacaacgaggcgcttcgcgctacacagagaaaacaatatttacaaagagataatggtctctccttatcttcctctgtgttctctgtgtcctctgtggttaaaaaaacctttaacccacaaagaggataagaggcgctgcgctttagagaatacaacaagtaatttattgttttccctcattgtcttctcattcttttctctttgtgaagatatttcggcactaaagtacctcctacgagctaggcctttggtaaaggcctgtaagcaacaccgttcagcttcaaactgacagctgaaagctgatagctttctctaaaaccgataacttacgctggcattatacgagcggccttgtccggcaagttgctcaaaaccattactcatatcttgcttgtaattagcaatacttacaccgccaagtggctgttggtagtattcatcaagtaagttagtaattaccaacttaaaggttaaattttgccacgttttctgacttgagatagccaatagttgataactgtcggtttggttttctaaacggcgttcatcaacatggggcttactatcaacccattgccagctcagtgcgttttgccagcctttgtattcgtgctctaggctcagctcagtgtgtagaggcataatttgatataagtcttcattactatcatcacgttcgccatgtgtattggttagtgagccttttaactgccactttcctgcttgctttgtgttgtaaagctctactaagcccgcaagttttgcaccgtaaagagtggcatctaggttcgtaaaagtaagaatattacgcttggtatgcgccatgtcagtgcgattaaagatcttagtcacttcagcatcaatataatcatttacttgcgtgtaccaaacatttgccgttacttgccagctatcgtctttagcaagtttggtgtagctagaactcaatgtatgagctgtttcggcttctaaatctgggttaccaatgtaaccattaccatcgccaaaccaaccaatcatagtggttgccatcgtacctacaccccagctataacgctcatataaattaggtgcacggtttttacgagctaaaccaaattgcagctcatcgttattcgataattgatagcgagcaagtaagctaatatcaactaaggtgtcgtcacgtttacggtctaattggttaaattccatcgcagcttgggcgtcggtttttgacatatccatcattgagcccatattagccatgccgctcatgccaccttcgttataagcctgcacttcgccagtatctgtggtgacttgctcaacacgaacacctgccgacacccaccatgcttggtttacttggctttggtactcagcaaatgccgcaaagcggtcacgtttgccatcgttaatgtttacgtactcatttgggcccatcatcattgaccctgcaaccgccggccaccaatcatcaattcgataaccgtagtattcttgccctagcattaatgatgactgttttgataaatcagtgcgccaatgaacttgataactgtaatcttgtgcatcggtattcattggcatcatgccggttttctcattactgaaaaaacccatttcgtgttttacatcatgcgcattcacttgtacctgcaaatcaccattttcaagctcacgttgatactgagcaacgaaaccataactggtgttatcggtcatatccatgtattgatttgcaaagccttggtaaggaattttttgatgcgtcagcttaactacaagctgttgtttctcatcacgaacagcacccgttaagacatgattttgcacttgatataaggtatcaagcacacgctcaccatacccatcatcatagcttttagcatcttcaaagctgccttggtaagacaagctaaattgtttgctcgcaaggctggcacctagcgcgtatgcttggctatcgttaacgctcttgtatgctgctgtcacatagcctgcgcgccagttcactgagtctgtatcactaaattcaggggcaatcgtatttaccctaataacaccggcaatattatccccgccactgcttaccggtgatacaccagcaacgacactgtaagaggcaatttggtttgccgacacataagagagtggcgggttcatttggttagcacacgctgctgtgacatcagcaccatcgactaaaactttaactctatcgcccatcatgccgttcagcacaggcaagttagacactcctccggccgctgaaaaatcaacacctaaatctttcagtaacgcgtctgcagagccaactaattgatggttattttgggcatgaccttgtacttctatcacttcaatagaatcatcagcaaaggccgaaatacttaatacacagctgagtgctgtagcaattttagaaaataaaaaaccagggcgagaagatagcgtgttcataactgttttaaaatcaaagcaaataattaatgacgccgattataaaactcattaattagtctgaacacgtgacatattgtcgcaccctgtcacaggtgaataacttagcgcagcaccactaaaggaatacggctatcttcaagcatttttaaggtcgtgctgcctaaaaagaactgccgccatttagagtgaccaaatgcgcccatcaccattaaatcaacggcgtggtcacttttatatcgccacagcgcttggtaaacatcgccatcgagcatgcgcgctctcacattaaagccattttctgctagccttgctgaggcagtatcaagtttgtcttggcagtgaccgtcttgtttatccaccatcaccaaatggcaatctaagccggataaaatgccgccattgataatttgcgtaatcgctttgtcggtactttcgctgccatcataagctagcataaagtttgtgggctcatgaaattgcggcggcacaatcgcaaccggggtatgcacctgacggatcagcgtttcaatgtgcgagcccagtactttaaaatcatcgtagtgccctttaccagagcggcctataatcatcacacgggcattgtcttcatgttcaagtaaagcatcaacaagactcattgaaagctgctgttgctcaatctcggttaggcctgcatgctcggcttttttcattgcttcatctagcaataattgaccatgctgcgacgctactttgttgcgctcttgttcaagttttgccaattgctctaacaatgatgtttgcgagcctaaacctataattgcggttaaatcatcactgccttgtggcaaaggtggctctagtgcatgcaaaaaattaatcgggtggctggagcgcttagaaatccaaatcgccgcttctgtcaccgcatcggtcatgcatgaaccgtcgatacaggcaaatatctttttcattgcgctctcctttaaaccaattcagttaaccaagtatagttggctttttctctgtatttattttgaacagcaaagacttaagaagttcaggttattttcttatagcaaacaaatatagaacgttccaaaaagtactgtatcaactccattaatttgtattacaatagcgctgggcacacacctctactccagaacaaagtatttgttactggcattttcaattatcaaaaatctattttgtttttaaatttattttaaaggaattacatgactaacgtagccaactcccaaggcaacgcaagcacgtttaccattctgatagtattggctttaggcacattcattttgggcctatcagaattttctatgatgccaatgttgcccctgatcagcgaaacattttcgtctacgccagcgcaaagtggttatgccatcagtgcttacgcgattggcgtagttgtcggtgccccactatttatgatcacaaccgccaacatgcgtaagcgaaatgcactgttgatgtttgtcagtatgatgtttttattcaatggtttaagtgcttttgcaaactcgcttgaacaacttattttatttcgatttttaagtggcttaccacacggtgcctacttcgccgctgctattttattggcagccgatatcgcccctgccgataaacgcgcaagctttatgtcaaaagtatttatgggtttaaccattgccactattgttggtgtgcccatggtcaccctagtggggcaaaactttagctggcgttattgtttggcaggcaccgctgtacttgcgttagttgccttggtattgattgtgaaatacgtacctaacgtaaagaataccgcgccaacatcgattctcgatgagttaagtgtattaaagaacaagctcgtatggactattctgggtatcatcattattggttttggtggcgtattttgtgtttacacttacattgccgacactattttagaagtcacccatacccctgcttacactatctctattgcgatgattatgtttggtattggctgtactttaggtaactatgtattaggtaaagccgccgaccactcaccgctgaaaaccacaggcgcagcgctaattggtgctgtagtatttgcagccagttatgtaagcgcaagccataatatttggctgttatacgcggtgattttctttataggctttagtgttggtttaggtaccgtgatccaatcgctattaatggatgtgtcaccacaagggcatgccatgattggtgcgctagtacagtgtgcgtttaatacagctaatgcgataggcccttggcttggcggcatggctattgctgaaggagcactccctagtcaaacaggctatgtttctgcggcactattcttaggtggttttttaatgtggtcgttaagtgcgatgcagatgaaaaaactacgagtcgaaagttaacaaaaatctagctgcgattttatatcgcgtagcaaaaaggcgtttaacaagaatgatttaacattcggcgttaaaacgcctcttacgctatcagacttactcatcctgaaatatctcttcgatactcaggttaaataaacgcgcggctttaaatgctaatggcaaacttggatcaaatttacctttttcgatagcattcactgtttgccttgatacatcgagtaattcggctaattttgcttgggtgtagttgtgctcagcacgaagcactttcaagcggtttttcattcctcgccctcgtcgtttaactgcttattcatcattaaaagactcactaaataggtaaagcccataaagagtacgaggtgcgatatatcttctttaaagcttattaaaccacttgattgcaccaccgagtaagctaaaccaaatactaagcttgcacccaaggtaatcgccattgcattaaggtgcatacgctgctgcagctcatccattccttgaagttgtcgtttgttcgataaaatcatcataatgccaactactacattaattaagattgccacaacactaaaaacagcctgctcttgccataaaaaatgcggcccaaatgaggcaattgctaaagtaatcacccatgctgatgtccatttagcgaggtttagcgtgttctgcttattacgttgtttaaaggttaatcctgtctgatccattattctcaccttaaaagtaaagtaaacttgactaaagattaacctagcaacacaaaaagtcaaacaaactttacaaaaagtttcatatacacgacaccaatatgattttttaatgtcagaaaaggcaaggcgcttgctgttaatctcataatattgtattaatcaaagaattccgtaatctaatataaaatcggtccaatcggactgcgtttctaacaataacaatgaagataacactatgaatacggcactgtttttcgttggcgaatggcaagttaccccggccactaattcaatcaggcgcggtgaacaaacaaagcatcttgaacccaaggcgatggatgtattactgctgctatgcgaaaaacaaggtgagctactaacaagcgaagaaattatcagccattgctggcaaaatgtggcgctgggtgacaaccccctacataaagtgatcacccaattacgtaaagcctttgacgataaagcaagcgatccgcattacatcgaaaccattcgtaaacgtggttatcgggttattgccgaaatcaactttccactcaacgaagaacaaaaagccagccaaaccagttggcaaggtgattcgccctttgttggcttaagtgcgtttgcaccagagcaagccgatgtattttttggtcgtaacaaacaaattgccactttgctacagcgggtatcggctcaaatagaatttggtcgcgcattttgcttaattttgggagccagtggttcaggtaaatcgtcgttagttaacgcaggtttattgcccgctttaatgtcgagtaatggctacgatggcataagagtacacagttactgccaactcgactttgccgatgtcagcaaagagcgcttactgcttgatttagcctcaaccttgctcgatttagaaataaacgacgcacctgtacttagcgatataagtgccgatgcgttggctgaattgttattaaaagacccagaacaggttatttcccgctgtaaagcagcacttgcagcgctaaatgcagagcgcaatacgccctatttatttttatttatcgacaggctcgaagtgctattgtcatcgccgctatttagcgatgacgagcgcaaccagcttttagctcttattgagcgcttagcaacaagtggctgcatgatcatttttagtgcctgtcgtaatgacttttacccgcaagtagtgagtcaaccaagtttaatggcaggtaaagccaatggcgcacattttgacttattagcgccaactcgctctgagcttaagcaaatgatccgtttgccagcacttgcagcaggcttaagttggcaacatcacccagagcatctcacaccgcttgatgaacaactttgtaacgatactgccaataacccagatgcattgccaatgctgcaatacaccttgcagcagctttatttgcagcgcagcccagacaacgaattattgttttctgaataccaagcgcttggtaccatcgaaggagccatcggccaaaaagccgaacaggtattttgccaattacccaaagaccaacaaactgaacttgccgcagtcctttctaaactgatcaccttaaacccagatggcgaaacactcaccagccgcgctgcacgttggagcgaattaaccagccctgctgcaaccaagcttgttcaggccatggtcgatagccgcttgtttgtgtcgcaccttaaaaatgagcaagcctgctttagtcttgcccacgaagcgctgctgcgccattggcaacgcgccatagattgggtgcaagagcaccaacaaagcttagcaattcaaagccgcgtgcaacttgccaccgagcgatggctgctagaacataaacacagcgactttttattagcgcaaggcaaaccgctgcaagaagcacaaagcctagttaaaaaccctatgtttagcttatcgagcgacgaacaagcgttaattaaggcttctaacaataaagccaaacgtaaaaaacgcgtgttacaaataacagcggctgcacttgtgtgcttaacctttattgctacatttatgagcgtgcgcagctatcacgccgaacaaatagcaaaacaaaaacgccaagaggctgagagtttattgggttttatggttggtgagtttgccgacaaacttagaagcgttgaacgtatggatttacttgatggtattagcaacaaagcccttgagtattttaccaatcaagacgaggaagctgcctcgttgtttgactttagcgatacacaagccgagtttaataaccgttttcaatacgctcaaaccttagaggctatgggcgaagtggcctactcgcgcggcaaaaccgacgaagccttcactgcctttgaaaatgcgcgaacgcgcctagaatctttactaaaagttcaacccaataacctagatgttttaatgctcgcaggggccaatgcgttctggcttggtaatttaacttatgagcaaagtaattacttagcgactgagccaatgtttaaacgttacttggcttacagtgaaaaaatgtatcagcttgcccctaatgactttaactctattatggagctatcttactcgcacaattctcttggttcgttgtatttaaagcagtttaattatgcacttgcaaaacagagctttactgaatctttaaaactgaaaaaccaagcccttgagcttaaaccgaataacaaaaatttattacgcgataaaacagacaccattagttggattgcaaccacagaagaaaggctcggtaatttaaacgctgcactcgaactacttgaacaagcctctcaagagctaatcaacatgcttgaaacatcaccgaatgacgcaagcttacataattatttagcaaacacttttatgcaacaaagctttttattgagctattttccaaataagagagcagcatttttaaaagctgaaaaagcaactgatgcaattaatcgagcaagaatccaagatccaaaaaatcaaaactttcaacgcaccttttatagaacacttgcataccaattaatgctgttagataaaagtaaaacaagtgaaagagtaaaagatgttttaagttacattgataaccaaggggtttcagatacaactttaataaatattcaaataggagtgattcattatttaatcaatcgaaaccttttaaacgaagccaaagacctcttgttaaaattagagagcaactcagactttattgagagaatatctgacactagcaaaatagaaaacctcgctgctctaataaaggttaatttaattaaagcaaagctttctgaagacaaaatagcaagacaaaaagcatgccaagaagctattaatgcaattgaagaaaataaaaacggcgataaaagtataaaaagaacttacccacttattcaagcctacacctgtttaaatagggtaagtgaggtaaacacagttaaaagtaaactaatagagttaggcattactaactttgaactataaaaaacaactagaaggtaataataatgagcgaaagtcaaactttcaactttacagtgaatattaaacttaacactgaaaatgaagctgtatttacatacttccaaaacggtcagcaagtttctggaggcggtactatcaatgaaagaaacagcctaggcatttatacacttgatgacgcaacagttgaagctggctttcaatttacaggcgcgaaatttgcaaaccttgaaggtgattgcgagcaagactttagctttaaagtcactaatgatggtcaaacaattgaaatagcggatactgatgaaaatagcggtactgcgtgtatgattttcattgtagagtgcaatggcacaagctatgaaagtgccgatccacaagtgaaaaatgataaagaagactaagaaacactcactttaagctccttttatggagcttttttacatttaaaaacaaacaattaaaaccagaagattaccagaaggttaatttgcacttttttaagtaactttatagacaccaaaatcgtttgcatcggcaaaaaggaaacgaacgtgtctactaacaacaagaatgaacaaccaagcactgctcaatcagaagcgaaaaactcactaccgcagtctatcaattcagagcaacttgcactaattgcccaaatgtttcagaacattcctgaaggggtgtttatcattaatggtcaaggcacgtttgaatttgcaaacccgatggcggcacaacttttaggtgacaaccaagaagcgttaatcggtcaaaacctgttacattacctacacgacaccgaccgtgataaatacatgtataccctactcagttggttagatcataaagactcgccgataagccttgggccaaacgaagttaaaataaaccgcgccgatagtaaaacccttgaagcggatttatgtatttcaagcttaccaaaaaacattgccgttgcagataatttatttatttgtgtattacatgatttatcatcacacaaagaacaatataaccgcttaattaaacaggctaccactgaccatttaaccggccttgcaaatagattaactcttgaggaatcattaaaagagcattggcaagaaagcgtacaaaccaaccaagccattagcactatattaatcgatattgattactttaaattattcaacgaccgatttggtcatgtaaaaggcgataagtgcttacaaaaagtagcgagtataattgcagaatcactcccctctcatgactgtttggcagcccgttatggtggtgaagaatttgcggttatattaccaaggtgtcaaaaagatacggcagcagttattgcaaagcatattcaaataaaaataaacaatatgtcatttactgaaattggcctaccgagtgattttagaataagtgtaagtcaaggaattgcttgcgagtttaataatcaataccgtacttctgaggcactaatttgtgctgcagatactgctttataccgagcaaaaacagagggcagaaataaaataagcataagcgcataaaaggttattttagtgtagaactatgagctaaatagcttgtttagataatcatatagtatacttttatgttatttgtttgttccttttttattgataaactgcaacgtgaaatcaacgtcacaagggatccaacaatgacactttttaaaaaagtacctttgcaactcgctattgcaagtacgctagctacatcagtgactgcaatcgctgctgagcaaacaacagaaaacactgctcaagatgttgaagttatttctgtaacaggtactcgccgaagccttcgtagtatttctgaaagtactgtacctgtagatttattaacaagtcgcgatctaacaagcactggccaacttgatatgagccaagtacttgcctctcagttacctagctttaactaccctagtgccaccattgctgatggaactgaccatgcaaaaccggctgttttacgtggccttgctcctgaccacacattagtacttatcaatggtaaacgccgccatgcgggtgcactattaaatttaaacggtacagtaggccgtggttcaacagctgttgatttaaataatattcctacttcagcaattaaacgcgtagaagtacttcgtgatggtgctgctgctcaatacggctctgacgcgattgctggtgtgatcaatattgtattaaaagacgccgatgaaggcggcagcgtgagcttcacatatggtgaatacgatacacaaatggcagggtctcctcagctactaaacactacaacagatagcgaaggcaaccttagctttgagactggcggcgaccgtgaagtaaatgatggtatttcacgcacagcaagcgctaacgcgggttttgcgctgggtgataatggctttattaacctgtctattgagtcacgaaataacgagccaacgaatcgctctggttttgaccaacgcgaacagtacagccgtgatgcaaatggcaatttagaccctcgtgaattcgactttgaccgctataaccaccgttttggtaaagcaagcattgaagatttcgcgcttttttataacctaggttatgagtttgataactcgttatcactttactcttttgcaagttactcaaaccgtgaaggtaactcaggtggcttttatcgtcgtgccaaagactctcgtaacttaactgaagtgtatcctgacggcttcttaccgcaaatagatactgatgtagatgactactcatttgcaattggccttaatggcgaaaccaatgactgggcgtgggatgtaagcagcaattatggtcgcaatgactttggtattggcgtaagcaacagtttaaatacctctatgggtgttagcagcccaacagaatttgatgatggctcgctcgtatatgagcaatacctagtcaatatggatgccagtagcacactagatttaggtttacctgatgatgtgtttgtgacaattggtgctgaataccgccacgaaaactatcaaatcaaagcgggtgaaacggcctcttacctaaccgtattagatgacgatggtaaccctgttgctgccggtggcgcacaagtattaccgggtttctcacctgaaagtgcaactgataaaagccgccataacattgcaatatttgctgagtttgatacttatctaacaacagattggaaccttgttttagcaggtcgttttgaagattacagcgattttggtagtacctttacctctaaactagcttcgcgttacagcattaatgagtcactgtcgttacgtggtgcaattagcacaggttttagagcgccatcacttgcccaaacttcatataagtcggtaagtactttatttgagaatggtgtgccaagtgaagtaggtttattccctgtagatgaacctgcagcgcaagcactaggggctcgtgatttagatgctgaagagtcagttaatatgacggcaggtttcatctttactcaaggcggttttagcttaacgcttgatgcgtatcgcattgaaattgatgaccgtatcgtattatctgaaaacttaagcggcccagaagttgaagcgattttagccgaagctggcgaagttaatacacaacgcgttcgctacttcactaatgccattgattcacgtacacaaggtgttgatattgttgctacttactcattaggtttagaaagctatggtgatttacgcttaagtgctgcggttaactttaacgacactgaagtaacacacgttaaagaaaatccaccggaattagaggcgttaggtgacagctacgagtatttttctcgtcgagaagtaactcgttttgaaaaaggtacaccagcggataaatggaacctgtctgcaacgtgggattatgaaaacttccaaaccacattacgagcaactcgttatggtgaagttattgatacctcaaatagtgctgaaaacgatgaagtacttgatgcaaaatggattgctgacttagaagtggcttatcgccctgatgagcagtggaagtttgcattaggtgccaataacctattcgatcagtaccctcaagatactgtaagcaatattggttatagcgattttaaccacatattcccttatagtggctttgcgccatacagcttagatggccgttttatttacggtaacatcacttatagcttctaaaaaaatagggcgtgaaagcagtaattgctaacacgccctaacctacaatgatgagtgaataaattaactaatttgaatagtgtgatacgccaataaagtgccatcactattttgtgctgtgtttaaaataaactgctcataatcactaccaaacacgttatcgttgctagcaagggttgtatcttgttcaccgcgtgatttgtaatcgctgtgagtggtacaaatttcttttgcaaacgcatcagtaaaacagaactggctaattacatagtcgttattgttgtttgctactttaaagtgaatatggatagtacggccagaataccaaccagggaaatgcgttttaaagttcacgcggccactgctatctgtgatcaatgaaccacggtaccaagtacttgcctcagcttcggcatcgccatcagtacagaaatcacccgcaaaacgtgagctatcagaactactgcttgtatcacctgagtaaataccgctggtatcacagtgccaaaccgagatttcgtaatttgctaatgggttacagtcgctatcaattaactgtaagcacagcatcataggtaaaccggataagccatccgaaatatcttcgtctgaatcagcttggaagtaacatgggccttcggttgttgcttgagtaagtgctaacacacatgcggttgatgtttcaaaaatactgtcatcaggaaagtcatcagtaataagcgctgttgtgccagatacataatcactgtcgttcgtggttgttgtatcgcctgtatcagtgctggtgtctgtgcctgttgaagtgtctgtatctgatgttgtatccgttgacgatactgtatctgagttacagcctaaaaatgccaacataggcacagcagcaactgaaacacctaatgttttaagcatttttctacgagtataaagttcaggttttaaagtcatcttgtgccccttcgctaacttgagtaattaacatcgagtataaagaacaaatgtagagactttgtgtagaaaaagtggtgcttttatagagtgactaggatgcgcatgccaaaaaatagacatttatagtatattcatttctggctattacattttactattacatctatgaagttaattcacaaactcttaattactaatctaattattacgttattgctggtactgaccatgtttggtctgaatgcaattaccaataagcgtatgctcaataatgtgtttgaagatatagataacgaagcatttaaccgtatagccactgaaattagccagcagtatcagcaaacgggttcgattgggatgtttatcgattctaaagcgctgtggtatgagctaattaaccgcaattttcattcaagccgtttattattttcacccaatagcccaaaaccaagagagcccggcccttttacacaagatgaccctcccgaaaagcgtatgcaaactgaggctatgccaccccctgatgattttgggatgccaccatcgttcgaccaaccacctgaatttgacccatcaactgagtttaacgagcctgcaaactttgctgacatgcataagccaccgcctcgcaataaacccatggctaatgactttataccctttgaaaaacgcctaagcttgcttgatgcaaaaggcgaaatactgattgctggcaataccgaaacagaggtcgtgaacgaacaagaaatcactcacaatggtgacgttgttgcggtgcttcagctgcatgctaaccgcaatcatgttagtgcactgactcaacattaccttaatacacaaattaatatcagtttgtggacagcagggattggtttattaattgctttattgtttagttacttactcgcacgtcattttactaaccctatttcacagctgaaaaaaggcgcaaaagcccttgctgaacgcgagtttgagacccaaataaccatcaacagcagtgatgaatttgctaccttagcggatgattttaatcgtattgccacagagctcagacgctttgaatcgcagcaaagccaatggatcatggatatttctcatgagctgcgcacgcctttaactattttagagggtgaactggaggctattaacgatggcattatcgaaccaaaccaaaaagcaataagctcactgcaagaagaagtggcgctgttaaaccgacttgtgaacgacttacataaagtcagttcactcgacagacacagctttaactatcacatggaagccatagattttaatgccttggtagccctacaagcgcataagtatgcgtttaaatttcaatccaaaaacatcacgcttaatgccaccttaccagagcaaacggtaatggttttggccgaccaaaatcgtattacgcaagtactacaaaacattttagaaaataatttacgctatacagatgaacagcaaaaagtctggttagatttaactgtgtctaaccatcatgtatttttgtcgatagaagattcaggccctggtgttcctgatgaagcccttgaaaaactatttgatcgtttatatcgcaccgatagctctcgtaacagaaaaaccggcggttttggcttaggcttggcaatttgccaaacaattgttgaagcccatctgggaaaaattaatgcaactaaaagccgtttcggcggtctgtgtataacgttaaaactcccgcttgcagaggcgcaataatatgtcagaaaccttagctaaacagcatattctcgttattgaagatgaagttaaaattgccgaattaatagaaaagtatttatatcttgaagggtttaaaacaagcctaattcacgatggcaactgcgcactggatgctgttaatgagctaaaccctgatttgattattctcgatatcatgttgccaggcacaaacggcatcgagttgtgcagcaagataagacaatacagtgatgtgcctattattatgcttaccgcaagggttgaagaaattgatcacttaattggttttgatgtaggtgccgatgactatgttactaagccattcaaaccaaaagagttaatggcgcgtgtgaaagccattttaaaacgacgccgaatgccaactaacaaaccgagtatattcacagcaggcaatattattgttgatccgagcgaatacaaagtactggtaaaaaatgaagaactgaaacttacaataaatgaatttagtttattaaaaatattaattgcctcacctaataaagttttttcacgccaagatttactgaccatgacccaagggaagtactttgagagctacgagcgcagtattgattcacacattaaaaacttgcgtaaaaagctgactcaagccgaccctgatagccattacattgagtcaatttatggcgtgggatataaatttaaaatttaaacaacctttttcacatttgcgacgactaactaaataacataacccattaggacatcattatgaatttagtacgcatcagcgcaagtgcactcttaatcacagccactacagcgtgtatcggcctctcaaatgccagtacagcaaacaaccaaggtgattatcgcgttattacttttaaagactgtaaaaaggtaagcgaaagtaccctcaataacgaacagattgctgcatacctagagcttgaacgtgaacaagtaaaactagaagcgctagaacaaccaattagtgacatagaacaacaagttactgactattctgagcaaatagaagcgatcaccgaagaagcagttattgaagacgagaaccacctacgaattaataaaagcttattaaaagagcaagataaactggctaaagaactcaataaacttatggctgctcatgatgccgattttaaagcgttagaacagcaagcaaatttaattgaacatgccgctaaacaatttgataaaactatgaaaccgttgatggaacaaggtgagtcaactcacctacaaattttagcgccgggtgaagacgaaaaaccgggctgtttttacaatatttaaagtacgttttctagctgtgcataaagcttcgcgtgtgttttacgaatgtcacctttatgcacttgcttaaaccactttaaagcttgttctggcttgcctgcctgccaattgatttcagccaagcgtagcttataaatagcaagaacaaaacgatcagactctacatcaatatacttaagtgattgaacatacaatttatctgcttcgtcgtactgagcaagtatttgatacgttctcgctaaattgcctaatgctacagagattttacgcttatggtttgtttttaaaatccaatctacagcaacccgacgacttgcgagtgctccatctacatcacccagtgaatggaaaacattggctttgtttgaagcaagttcaaaatgaaaaataggatctttgctctttccaaagcgacgttcagccctatctaatatgtgcaatgctgtttctttgttgccaaacacgtattgcaaattggccaattcaaccatgcgcattgggttaccgaatgaatcgaaaatagcctgtaggttttcaaatgccaaagtcgcgaatttgcggccttgttcatgattgccgaaatattgcatcgactttgcgtaataaaaataaacttgaacttgaaaaacaacaggaaggtctttgccatttataaatggctcggtgctatctttaagggcgagatattccattttgtcgtaaaagtaatcaaactgatacgacttaatttcataccagcgtgccgaaccaggctctgctaccgctagctgttgattaatataatctaagcatagagcctgaggttgttggctacagaatatctcatggtcactaaagttctctgatgctaaagcattaaagctgcagaaaataaataacaaaaaggttaaacttttcttcatctactaacttctaagtgacaatacacacaaaaaaataacaaaatatcctgctatattacagcactttttagttaaatttatagttaatattaataatttagattcttcacacagtgaatttaagcatttttatacacttaataagtttgaaattgcatgactaacaaaaaagcaggctaagcaccgagttaacctgctttaaaattatttagagtagcaacaaactacctaagccaagaaaggtgacaaaacccacaatgtcggtgactgtggtaagaatcacagagcctgaaagagcaggatcgattttgagcttatccaaaatagatgggatcacgactcccgataacgaggcagccactaaattaagtaagatagcgatagtaatggttaaacttaacatgccatcgttgaaccagaaataagtaagcacgccaatcacaaaggcccaaacacagccatttaatgcccctactcttagctcttttttcaacagcgctctgcggttagagtcggtcacctgaccgagtgctaaaccgcgcacaataaccgttaacgtttgactacctgcaataccgcccatagaagcgacaaccggcataagtaccgctagtgcaaccacttgctcgatagttgcaccaaacaaaccgataaaccaagaggctaaaaatgccgttgctaggttaataccaagccatataccgcggttttttgccgatttggtcacgctcgagaacagatcctcgtcttcacgtagaccacccgcttttgcagcggcttcgtctgttacttcttgacgcaattcataggctgatgacaccgacaaacggcctaatagtttgttgtcggcgttaaccactggcatcgccattttttcgctatgaataaccacttcggccgcttcgtataagtcgtcatcagcgtgtaaagccgacacatcaaggttcgcgtaatccagcaggctgtcgttatcattggctttaaataacgaattaattgccacttcaccaataagtgtgcctttacgactcaccaaataaatcacttcggtgtactgtggtaagcctttttgaaaaattttacgcgcgccagctacagtgagtttttctgacacttttagcgcatcaaaatcgagccagtgacctagctgctcagggttatattgctgtgcaaggtcgtattgcttcgtttgaacttcatcaagttgtctgcgtgcataatcaacaaagcgttcgggaataatttcttcaagttcaagtagctcttcaacgctaacttcgtcaagtaacttaaagccctcagcttcatctaaactctgtaacaaccagcgacaactatcaccacctaagttaatgaaaatttcatgctgggtatcttcatcaagtaattgccaaatttctaaacgttgttctttaggtaatgcttcaaacaataacgataaatgctcagtagaaagcttttctttagcatcagcaagtaacttatttttacgtgttgtagtgtcacactgaagcaagtcatcaattaactggggaagttggtcaacaggatactcaatcatttgagacctcggttaattacatcaataacagtagtctaacgcagcttaattaaaataactgcccgtaattgatatatttttatcttcatccaatcagtcatataggtgagcttaaggacttttttcaattatcactcagtaaaactaagtgagtattaccccttcaattgactaggcgtaagccctgtccagcgcttaaatgctcgtctgaaattagcaatatcataaaatgataagcgcatggcgacttgctcattgcattgctcgcgcatggcaagtaggtaaatcgctttgcgcttactttgctcatcatacaaggtagaaaaacgtacgccatgagcttttaatttacgcttgaaggttgcagggctcatggcaaattggctggctacctgctctaaatttaacgctggattttgataaattaatcggcttacggcttccacaaaagtgctatttgcagaatttaatgccgccagttgcgagttaatttgtgagaacctaaaactactaaacgcggggttagtgagcctaagcgcgtgtttattcaatacccaacgggttataggcttttcaaaagcgactttaagacctaaatgctgctcgtattcttggctatgtctggcgcgtttataggcaaactcaaactgacaagggactcgctcacccgccacttttttaagaatttggtaaaacgcagcgctgtaaatttccataacatactggcttatttcatcatccaagcccacagcattttgcagcacaatgtaatactgctcgttatgcacataactataactaaataacaaaggtgccagttgcatgcgcaaattgtgtaactgctttaaagcttggccgatgtgcgctgcatgtaacacgccttgggcggcaacagaggtatcgtttgctagttgactgcctaataaaaaaccgctgtcggcggacttcatcaactgcttaaactgcgtcaataaacgcacttgctgtgaaatactaaactgatgctgcacactcattaagtcttgctcaaacacccctgtgcctctgagtaacttatgcagtgcaatgccgcgacttaaggccagctccaccagcgtggtgatcaggccctgtgcggtaaggtatttgtcatcttggttaagatacggcttcacaatggctgactctttgttgtttttgttgttgtaacttagcgtgtaaacgcgagcttaaactttgtggtgtatcgccttgcatactgcccactaaggccgctgttacatcttggaacttagcgtgtttttcgccttcgaccttaaatgcacaatggctcagcgccgaggtaatttgcgccaccagctctttcgcttgtactgcgctggtgtttggcattagcaccataaagcagtctcctgcatagcggcacaccacatcgctaaggcggcaattcatcaataaaagctcgctcacttcacggagtaagcggtcgccttcaataaaaccaaattcagcgttaaaatcagcaaaaccacgaatatcaatggcggccagttgcaatggctgcggctcacttaactgctcttttagcactgcttgtaagtaatcagccttataaagccctgttattgagcacactaattcatgctcacgatgctgggcttcacggcgttttagttgcctattcagtacgtattgctcttggtgccattgatacagcccaaggcttgtgaaaatcatgcctatcggcgcaggcagcgattcaatccaagtaagccaagtattggttggttgatgtaaccactcatcaaataaatcaagggaagctgaaaacataaaaagcccaagcccaagcactaaaaagctggtgactttgccgggcggcctcgaaataagcagcgcagctatccaagtaagggtcattagcacaatgccaccctcgcctaaaatatctaaccatgcgatatcagcaagaggctttaattctcctgcttgtgcgcttagcaaaaacgcaattaaaaatagagcaataactgcattggttaaaagtcgatgatgagtaaaagggttatatcgcattctcagtacctaacaataattcacgctgtcatgctaactcgttagcgtttaaagcagcagggtcatattagctcaatgatgtgacagctaaacgacagtcaaaccttgttaaaccccttaagcactgtatttaccttaacaagatggggttattgcagctcaaaagtacttttaaaacccgctaatcacttgtttttacaggctgttagcgattttctgtcacatttgcgtcatttaagctgcgtactttgctcatcaaaccaaggacaaccaggagcaaacccatgaaacaatttaaaacgaaggcgttagtaagcgccctcgccttatgccaatttgccgcttacgcacaagacgaacaaaacagcgatgagaaaaaagtaaaagtctctgaagagcttgtcgtctatggcgagattggttatcgcaaccgctcacaagagctggcaccgacgcttgaatactcacaagaatactttcaacgttttgaaccgctaactgctggtgatgcattaaaacgcgtaccgagtgtgacgtttttatcggatgttttagagtctgatggcgcgcgtatgcgtggcttaagcccggcttacacaaaggttcttattaacggtgaagaagtaccaggtgcaggtgctgatcgctcattctttgttgaccgtattcctgctgagctaattgagcgtgtagaaattattcgtgcttcaagtgcaaaccgctctgccgatgccattgccggtacgctaaacattgtattgcgtgacggttacagcctagatggtggttaccttcgtgcgggtggcctgcgttatgatgatggcgaattaaaagaaagctttgccggtgtttacggcactgagtttgctggtggccgtttattacttggcgctaacttacaaggccgttataacccaaaacaaaaatcaagcctacgctatggcgacagcccagagaataacgccaattacaaaaccgaagaattcgataaccgcgaagatcaatcagatattcgcgacggtgacgatacctcgctaaatgccagctacgaaattgcttttgatgatggcagtaagtttgatatcagcgcgatttgggttgataccgaccgtactgaagatgagcgctcatttgaatatgacgacccaacagcaatcaataactcaattgttgaaggcggtaatcttgaaaccgacaacgccaatgtgtcttacatcgaccaaaccaactacaacatcaactcgggttatgagttacccctttttggtggcaccagtaaatttaagcttggttttgcaagctttgaagagtctgtttacgagcaagaagtagaaatcgatacctctgaactacctatggtgttcgaggaagaagaagaaactgtagaccttgatgacaaagaatggtcattacaatggcaacatagcttgtttgcaggcgagaacaaaacgattcaatttggtgcctttgtacaaggtaaagagcgcgatactgcggtttatcaagccgaagatgaaagcgaacaaagctttaccagctgggatcaattcagcaaaacacctctgtcactggcaggctttaacaacgagtttgaagcagccgctggtggcgtcaataaactcgaagaagaccgcctagatgtgtttgcattagttaagcacgaagaccaagacttctcgtgggagttaggtgtgcgctacgaaacaaccgactcaaccattactgacaaagcagagggtgtcagcgctaaaaacgattatgacttcttcttaccatcggcacatttacgctataacgtctctgaaaacggccgtgtcagcgcgtcggttgcacgtagcttacgtcgccctgactttgattacatcacccctgctctacttgaaaaagagctaggcgataacgactttttaggtaacccagacctacaaccagaatcatcttggggtatggacttaggctatgaatatcgcttaggtaaaagcggcgtcgtgggtattaatgtgttctatcgcgatgtcacagaccttatcgaaatagccaatacaggccaacaaggctcagaaggtgatggtacttacattttgcaaccgcgtaacaccggtgatggcaacgtaaaaggtatcgagcttgatttatcaacgccgctaagcgctattagcatgccaaacacaggggtattctttaactactcatggcttgattcagaagtagatgacactttcggtagccgtaaattcaacgaccaatctgactacgtatttaatattggttttatccaagatctacctgatttaggggcttcgttcggtgcaacttaccgtaaacaaggtgatgcttatggccgtatcgtgggtgaagaagtgaccacacactacggcgcagaccttgaagtattcgtagaaaaacgctggcaagacgtcacgcttcgtttagtgggctcaaacctattagatgcaagcaaagacgaaacctttaacaagttcgacacggttgatgaccaaatcaaccgcgactttgacgagtatgaactggagtctgaagaagcaggccctgttattcagttaatgctgcgctacgcgttttaatacacaaaagagttattaaggcagcgcattgctgccttattgtatatttggggatcccatgaattttaaaaaaccacttaatcttgttgccagtgcagtaatactgagcaccctagcagcgtgtagccaaacaacggcaaccgaggcaccaagtaaaaaccaattaacagcctttggcacaactgaaaatatgcaaggctcacaagcagcagcccttgctgatgacgcttggctattaagctcacaaagccaaggccttcagcttattgatgccgcaggtaaacagcacgcattacaaaaaggtaacttcgaagcgctgtctgttaaggcaatcaccaataacagttaccttgttgctagcatcgacaacgaagctgaccaagcggtgatttttagcttacaaaaagcagctaaatggcagctaactgaaattagccgtatcagcccaccaaaagcaaaacctgaggcggtgtgtttatttgctaacccgacaactcaagcagtttcggcatttgtggcagacgctcgtggtcttatccgcgaaacactggtgtttgatatggcaaacaaacgcgcattaaaccttgaattacgtgagtttgctggcgtaagtgaaacatcaggctgtgcggttgatgataacagtaaaactctttatttaagtgaaggcgagctaggcatttggcaaattaacgccgacgctgaatcgcgcgccgataaaaagcccgtggctttgatgtcgccatttggcagcttagcgcctgaagttggcggtttaagcacaacagatgatggtagcttatggttcaccacctctgaagataaccaattacatcgctacgaaaagagtactaaacgttttagcagctggcaatttgctggtgaactggcgattgaatctgccgcagtgcgctttaacaataagcaagctgatatcgtgttatacgatgatgaatcaggtcattatgtaaaaggtcaaatagatgggcaggctaaacaacataatagcgctaaaacagccgctgttacttacatcaatgcacaagcgcaaaccgatgcagtacgtgcttttggtgatgccgccgatgaccctgctatttgggtaaaccctaaaaatgcagcaaaaagcctgatcttaggtaccgataaacgccgtggtttaatggtgtatgaccttgcaggcaaagagctacaagcgctagaaacaggccgtttaaataatgttgatgtgcgccaacatgcaagtatcaacaacgcaacaaacacctggattgcaggtagtaaccgtactcacaacagcatcagtgtttatagcgtcgatactcacaatcaggtgcaacatcttgctgagctgccaacgactctaaaagaaatttacggtatgtgtatgtactcatcaaacacaggcaactatgtgtttatgaatgacaaatcaggcctatttcagcaatacaaactaactggtaataatgagagcgtatcagcacaactagtacgcgaatttagtgtaccgagccaacctgaaggttgcagtgctgatgataaaaccgcacagctatttttaggtgaagaagacgaaggtatttggtttattggcgctgagccaacagcaggaaataaacctgtaatgctgcaaactgtgaacgatatgttggttgatgatgtagaaggcatggaaatctaccacgcaaaagatgcccgctatttagtggtttctagtcaaggtgattacagctatgtgctttataaaattattgatggcaatacccctagcctagagtttgcgggtaaatttgcaatcagcaataacctagagttagcaatagatggcgtttcagaaaccgatggcctaacggtaacaccggctgcgctaccgggctaccctgaaggggtgctaattgtgcaagatggttacaaccgtatgccgcaagcaccgcaaaactttaagattattgactggcgcgaagtaaaaaaagctattcaataaattactccgtaaaggtgctcggtttatctgggcaccttttttatctgcacatgtttaatcagtaaaataggtaactaaagcccccaactattgctccgtaaattagcatcggcaaaaaggttttcttaagcactggcccttcttgattattcactccaacaatactggctacagcaataatattgctaatacagatcatattccccatcgccgcccctgttgattgcaacgcaagcactaaagtttctgataagcccacttgctctgcaataccatattgaataccgccaaaggtaagattagacaccgttgccgagcctgaaaagaaagtgccgagtgcccccaagcacgaggcaaataacacccagtgctcaccacttaaatcagcaaaggtactcgccatataaaatatgggcgcattatggccgccttgcattaaaacattcaccatcaccaatgcaccgattaaagcaatacatggcatagcaatgcggcctaaggtgtcggagcacatttgctttacttgtggcttactcatcttaagtaacggcacgcagatcaacaccaccaatacaaacgggatcaaggctggaacaaacaaggttttatatgaccaccccaccgacgtgccaaatatctcatgtaaagataagatcagcgctttacttaattcaaattgcgcaaagcccaaattgacactcagccagagcgtttcgtcgttaagcagtgctttaatacccagctgatgaatacgggttatgaccagcacaacaatcaagagtaatagcgggaataacgctacaaacagcgttttaggtgtgaactcaaccttgtttttcgagctttgcgtatttgcagctgagttatctaaacccactccccggcttgccaaataaatagtgactaatagccccactgcaccaccaatcagtgatggaaactcatagttccactgggcaaacaaccaataaggcaagacacatgaaaacacgcttagataaatgaatacgctattttgacgcaccttttttagtggcagcacaagacacagcgcaatcataggaataaccaaagcagcaataacatggcacagcgccgtccattttgagatagccagcacttgctggtcatctaactgtagcgccgaaaaaccaaaccacgttggcgtgcccacagcaccaaaagaaacgggaattgagtttaagataagagtgaaaacaatcactttaaaaggcgagaaaccaagcccgactaaaatgggcgcagcaatagccgctggcgtaccaaaccccgatgcgccttcgagcataaatgcaaatgcccaacctatgatcatcaattgcgcaacctgattactacttattgattcgagccagtgtttaatcgtggtttcggctcctgatattgccaacatgcgattaagtaaaatagccccggcaataatcgaaatgggcgtcatgacagacaacacaccagcaaacacattggcaagcaacagccttaaatcagcttgaaagtaaaacagctgcagtaaagcagcgagcagcgccgttattggtaaagcaatgtaagaagcgatggggctgcgttttaccatcatccagatcaatagcaaaataggcagtgcagccactagggtattcatgggtcatcctgttgttttttagtgctttccttaattaaaagtatagacaggataaccataatcagtattttttatttgttaaatgagtgtgctaagccaccaaattaacagtactaacacagaaataacgactaaggctttggttttgtgcttttgaataattcgctcagcctgattacccgcgtaataaacaactgcagcaagggcaaagtaacggattgagcgcgcaatgaccgtagccagtaaaaagagaaaaattgaatacttagttgcacccgcggcaagcatggcaatttgaaatggaatgggcactataccgagcgtcaatacaaaccaaaagccttgcgcttgcattttttgtttaacttgctcgaattgctcaggatttgagaaggtattaattacccaatcgcctactacatcaaataggtaataaccaagggcataaccaaaaatagcaccaataatacagcctatggtcgccattaatgcgattaaccacagcttttcacggcgggcttgcattaacggaacaagcacagcttcaagcggtataggcactatggttgactctaaaaatgatgccactgttatcgatttaagcatatgtttagagtcgataaactgccgtgttttttgctttaactttttagcaattgccattattcatccttaatcgttttgctcggctttagggtacaacaaaaacccttaaccgtcccttacggtttatgaatataacggctacggccttggtttttagcctgatatagtgcctgatcagctcgtttcattgcattactaaatgtttctgtggcgcgttgtatagctgaacctacactcacactgagtgttttactcggcgtaaccatcacgttactggccaagcacaatagttgctggcatgtctgactcaatatttcttgatcttcagtcggaacaaataaagcaaactcttcaccacctatacgggcaaataaaatttgcgggtctaatgccttatggcattgcgatacaaaatcaatcaacacctgatcgcctacatcatgaccatgttcatcattgatcgctttaaagtgatcaatatctacaattacaatactatgcggtgtatcttgattttgcagtacatagtggtagaaataacggcgattataggctttggtaagcacatctgtttttagctcttcttcaagttgctcgcgggttttagctaagtctgacaaagctaaaaacaaaccaaagccagtaaccaacataccaattgttcgagcaatatcctcaatataaattcccacccaaataggctgaaacacaagttcatctagaaagtcgaaggtcagtccgacactccatagaaaaataccgatacttaaaaataaatagcttctttgtgctactaccgatgtttgcacaaaggcaaatatacatatgaggatcaatagattaatagcatctgttaatacgccattgagataaatatcattttctaatcgattaaaatggtaaagatatgtcaccacaatcatcaacaatgaaataatgaacacgcttataaaaagctgctttataactagaggtactgagtttaactcagctttaacttcgattggtggaggttgtatactcataacagatcacgacaacttactgcaattggctcaacattagcaaagcgtgtttaaaagtgcatgacaaagcgaccgtgaattttaaaaaccagcattttggctggagtaattaacctaaaacaatcccttttaaccagcaaaaaagtctaacgtcatgctatttgtttgtaacagtcgcattctcgagattaattttttatcatctgagcgaattctgtttaaataaatattagcataatgattaacgcacgctttattccttttcgtaaacacgacatcatcaacctttgccaagcctatttaggtgagtcgcaatcaagttcgtttatggagtttgctgcacttttgcaaagcgtgacccattatcaatatcacgggttgctggagtcattaaaaaacaactatgcgccatttgacccaaatagcgacactcgcacgctgaaacctattaccgatgctaagcgtgccaactatcaatcagcttttgctaaagattttgccacggtactcaatgccgccaattttgaaaccattactgatcaagacctacaagatgcacttaaagaagagtctttatttaaagtccgtttggctgttgagtttaacgactttgcagaagtggtcttttatcgtcgcggcgaatcgcaaaaaaccgagacgctacgcagtttttggggactgcgcaaaaaacaaattcagttcaccaactatgaccgcgttgccatattcattcgctttaaagacgagcagtactttttagaaaaaggcaaaatgccggtaggattcgagcccaattcaaccatcgtcaaattattccagaatgtccccaaagccgatttagaaatgctgtttccgaatagcgaagtaaaaatgcgcccgattgataaacttattattggctcatctgccctgattggtggtgctgtggtgttggtaacaaaattaggcgcgtcaattttactgcttattgccttgattgctttttggggcggttggcgcagcgaagaagtgcatatgagtcagcagcactttattacctttgcaatcggcatgggtgtgtttggcagctttatatttaaagagtggagcaagtttaaaaatcgtaaaattcgctttatgaaagcactggccgacaacttgtattttaaaaatctcgataacaacgcaggtgtttttcataccctcgttgatgcagctgaagaagaagatgtaaaagaagcgctgcttgcctacacctttttattaaagagcaaatctgagatgactgcagagcaattagataagcaaattgagcaatggtttaacgagcaacataattgccagctcgactttgaaattgatgatgctttagacaaactcgtcaagcttgaactggttaatcaaaacaatgatctttattcggcggttgatttagccaatgccaaacaacgcttagatagtcgttgggatgactattttaagtttgcctaagcctttaaaatcaggtactagcgaagcacaaatggacttcgagtcaattcaactggggtaaatgcaactttatctcaatgtgcttgcgcacagcatggtctgcttttaggataaaattttacggctaaaaaaagaccattccatgcaattaaaaaaatcaatttttattggagccagcttgctgtgcgcagcaacaacagctcaggtatatgctaacgacaaatttgtttctgaagatatttttcaacttgaatacgcaggcgacccacaaataagcccagacggtaaaaaaattgtttatgtgcgtagcggctacgacatcatgaaagatggcaacaaacgtagcttttggctttacgatttaaagtctggtcaacacacgccgctgttttctgatgaacataactacagccaaccaacttggtctccagatagccaaaaaattgcttttaccagcaattcaagcggctcaaatcaacttcacgtttattggttagcgcaagacaaacaagcgcttttaacgcaactaccaaaatcagtacgtaacttaacttggtcgaatgactcagagcaaattgccttcaccatgagcattcctgaaagtaaatctgcgttcgctaaatcagtaaagctgccaaaaaaaccaaaaggcgccgagtggtcaaaaccagttaaagtaattgaaaaagcgcgttatcaagctgatggtgcaggctttttagaaccttcatatcgtcacgtttttgttattcctgtttcgggtggcacaccacgccaattaacatcgggtgattatcagcactatggtccacttgcttgggatccaagtaacacaaaactggctttttctgctgatcgcaatgatgagtgggaataccgcactactgagtcagacctttatgaaattaacgtaaaatcaggtgagcttacacagctaacagatttaccgggccgagaaagcaatccttactatgctaaagacggtgatgaactagcctttgttgctcgtgataacgcccctgtgccttatattaactcaacgctgtcattacttgatttagatgataaatcaatcaagcatattactgaaaaattagaccgttcagtggctgattataagtggtcaggcgatggcgactttgttattcaatacgatgattttggtaagcgtaagctcgctaaagtaaccagccgcggtaaggtaactgatttaactgatacgctatcgggcacttcaattggtcgcccgtatgttagcggtagttttagcatggccaacaatggcgcaattgcttatacaaaaggcaacgagtatcgcccagctgatttaggctacctatacaaaggtaaaactaaaacgcttacttcattaaacgaagatatattaggccataaaaagctaggtaaagtacacgagttgaatgttaagtcgcagtttgacggccaagccattcaaggttggtacatcacgccacctgattttgatgagagcaagcaatatccattaatggttgaaattcacggcggtccacatctagcctatggcccaagctttactgctgaattacaacgttatgccgctgaaggttatgtggttgtatatgtaaattaccgtggttcaacaagttacggtaaagactttgcattgctgttagatggtaaatacagctcagaagaagactttgctgaccataactcagcggttgatgccatgatcgcgaaagggtttatcgacaaagataacttatttattgctggtggttcagcaggtggtattgcaacagcttatgctgtaggtttaacaaaccgcttcaacgctgcggcaattaccaaaccagtgatcaactggttaagtaaaacactgactgccgacagctacattggtcaaattcgtaaccagttcccgggcatgccatgggataatgttgaacactactggaaacgttcgccgctttcattagtgggtaacgtaaccacgccatcattgatcatgacaggtgaagaagaccgccgtacgccaatttcagaatcagagcaattctatcaagcattaaaactgcaaaaggtagataccgtacttattcgtgtaccgggctcaccacatggtattgcgggtcgtccatcgcgtatgatttcgaaaattgaatacacgcttgcgtggttcaaacaatatcagaagtaataaattaaacaggagtgagctgctcactcctgtttaaaaataatgatgactaagcgcaagttgggcagagcctatcgactgcgctttttctccgcacacacctaaactcacttcacagctacgtagtccacgactatctaagcgtgcaaatgctgcaattgataacagcttgagctgttcaagcgctttactcggtaacggcgaatcaataatcacagcttgcatatctaacaaacttaaactgttatgcatggcaatactgatagcctctgcggctttttcaagccaaggctgaactagccgtttatgctctgcaaactgactgtctgttagctcatacacagaaatgccaagttgcgcattatcaaactcactttgcaatgacagtaacgaacattggctaagtaactgttcgcgttcagcgtttagcatggatcctattgcaccggcattaccacttttgccttcaagaagctgatggttaatcaccacagcgccacctaaaaaagcccctaaatagacatataaaaaatctctatagttattaggatttccgaggcttaactctgcacagcaggctgcgttattgtcgttactaatataaacaggtaactgaaactgactttctaagtagcctttcaaatcaaagttttgccattggctaaggggattttttgctgagtctgaagttgcctgccattgccaaatatcaaacggcatagcgaccccaagcccgcaaacatgtgagcgcagctcaggttctaattggctgattaattgaggaatatgtgtttctaaaaatactttaagctcatcaaccgatgcctcattcacctccaaagatacagacgctctttgcgtgctttgtaaatcaacgagtatcagatcgaagcgtcgtcgtccgatttttaaaccaaaactaaacgcgccatcagggttaagcctaaaaggcacacttggctgccctactcggcctttaacaggtgcatcacgaagcaatagcttatcttcttcgagcttattgatattcactgttgccgcctgagcagacaaagctaacgccttcgctatttgtgccttaggtatgctttgctgctgcctaattaaacttaaaattgcgcgctcgttattgcttcttggtgctcgcgataaactgctcttcataacatccttcttgatacaagctgataagcggcctattagacctgtttggcgtactatctaccagtcaaaataataaatcaactaggttgatttattatttgtagtcgtgaatactgtcggccacaacaatatgaacacattaatctggtgaactatgcaaacacagtccgctattgtatcgcgccaaatgctatggccttttattctgcttacaatttgctttgctgcttggggcactgcagccaatatgacagacccattagtgaaagtttttagcaaaacattttcgatgagtgccttgcaatcagcattggtgcagtttagttattatggcgcttatttttgcctagctttaccggcggccatgatcaatagacggtttaattataaaacggggctgttagtaggtttagccatggccgcctgtggtgccttattgttttaccctgctagccaaaccatgctctatagtcactttttattggccttgtttatacttgcaggtggtttatctattttagagacctctgcaaatccctatgtcatgcagttaggatgcgagcaaacagcaacccgcagacttaacctggcacaagctttcaaccccgttgggactaatattggtgtgtttttggcggcgacgttgatcttaccaaacttaaatcaagccgatagtgcaagccgtgctttgatgaatgaggcacaattaaaagccgttgttagtgctgaactcgatgctgtgatggtgccgtatgtgggcatggcctgttgtttaatcttgctatggctatgtatcttctttagccgctctcctgcaacagaaacaaaagtagcagcgcagccatgcaaacttaaaaagacctttcaacatttgtatcaaaacaagcattatcgatttggtgtgctggcacaattttttaatgttggcgctcaaacctgtgtatggacctacaccattggctacaccatggaagcacttaacaccacagaggtgactggtggccaagtattacaatattcgatgttggtatttttagtatctcgcttcattatgacatggctcatgcgctttataagcggcgctaaattactgcgttttatggctttagttgcagctgtactttgttttattgttgcaacgcaagttaacttaatgggcgtagtcgcacttgttgctatttcgagctgtctatctttgatgttcccaaccatttacggcacagcacttgaaggtctgggtgaagatgcaaaagtgggtgcagcaggcttagtaatggcaattttagggggcgcatttttaccgctgatccaagccgcaaccatagatgcctttaacactgcggtttcgtttgttgtaccacttgtttgctttttaattgttgctttgtatggtcaccacaccaaagtagcagcaatacccgccaaagcgcagttgcaggactaaacgcatcaatgagataatgcacctcgtttacctacttaagcgaggtgtatcgtcaattaatggcacatattacatttttcatggtcaagtttttggccttttctgttggctgttttgcctgctttttacttcatgaccaagctaatgttgcccttgttttatctgccgcagttactgggttagttggcacattcattccttttcctgctcgttttggtaatcacccatatgcagccatatacgctggcagctttgctggcatgtgctcatcaagtttaatcaacagctactgggaactgagctttatctctttaattggtgccagcctttacgtattaactatgaatctatttgcaggttttggtggtcgtcttggtagcgttgcttttgccagtgtagcgctttatatgctggcaaaaggggtcttttaatggatttatttattgctattaccgctttattaggagcctactcaacgtactttttagcgcatcataatcgctttgatggcatccgtgcatcagcggctaccagcattattgcatttagtgtcttgagccttttatctgttgatgtggagctctacagcgtggctttctttggcgggactttcattggcatgagcgcaccaaagcgctttggtatcttcacgttagccatttcttcgttactatttgcaatgttgtttgaatacttagtgccacgtttgcatggctacggcggcgcacttggcgtaagcgcatttttatctgtatgtgtttgtcatataggtattttactgggtgctcctcgcagtaaaaaaagtaactaaatcttacgcagcagctaaaaacctataccttttcactaatattaattaatatgttaataacttgtttaaggataaagggtctttatgctgctccgctcatttctgattgctaccctgctttgtttcatcagttgtgcgacggctgcgaaaacactgacctttcttgccgaagatttaccaccgtaccattttaaaaatcagcaaggcgaagcagacggtgcgcttgttgaagtagtaaaaacagctctggcacgcgcaaacatctccggcgaattcagaattatgccaatggcacgggctttttatgagcttgaaaacaatccaaacatgttaatgatttcgttactaaaaaatccagctcgtgaaagccggtttaagtggttagcacaaacctatttttcagatgcttatttagtggatctatcgagtaaaagccacaaaatatttagcttaaagcaagcccagcagtaccgtgtagcgactattcgaggctattcaagtgaacattatttgaagcaagcgggatttaatgaagataaaaacttggtgctagtcagtcattaccatcaactttggcaattgcttgaaaaagagcgcatcgactttgtgcttaccaacactctaaccttgcaaaacgaactggcattatctggggttgaccctagtgacattcataaaagcctgcacttagacgactttccctcaggcctttacctcgctgcaaaccttaatatagataaacaactcgctatacaattaactgatgcagttaaagctttgaagcaaagcggtcaataccaagcaattttacaaaaatggcagttgcctttacccaaataaaaaatgaaaaacactccattattttataaaagcttagctttggcttgcgcccttagctgcctatcgttaagcgcctttgcaataactcctgaacaggctcaagaaaaactaaacgaagcacaattgctacgtaacagtgatccaagccaagcaacggatatatttgagcagttaactaacgatacaaccctcatcaatcagccacagatcattcaagaagcgctcgaatcgttggcgtttatgaatgtaagcaatggcgattatgaccaagcactgagctatgcagagcaactactagattacggacaaacacaaaataatcaggctgtaacggtacgagcaatgcttattcagggttacgcacaaggtagaaaaagtaactttctaacagcagagcagcactaccgagatgcattatccattgccaaacagatacaagattctatgctgatagcccagtcttatgagcgattagcagctattttacgctggcaagataaatacatagccgctctaagcgaagcacaaaaagcagtcaatattttacgcgagttcgatgacgaaaaatcgtatgcatctgcgctacaaaacttaggtattattgaagccattattggcgatcacaatgcggcgcttgcaaatttaactctatcattttctttgcatcaaaaacttgatgataaaaaaggcattgcggatgcgctttatgaaattggcgaagtttatcgacgtatgggtgacaatgctcagtcgttaaagcactttaaaatgtctcacgtgttggatttagaaattggctctaaagtcgatattggtaatagtgccatgaaagttggctatgctgcacttaaacaaggtgaacttgctacagccaccgattatgctgagaagtcgattagctattatcaacaatcatcttcaaacacagggctatgtcgctcgtataatttaatggcgttaattgctttaaaacaaggcaacattagtgaagcgcaagcatatattgatcgcgctttagcaatcgctactgactataattttcgatcacacttagtgtctttagggatcactcaaacacgcatctatcaagcccttgatgatcattcaaaagctattaaaaccgcagagcaagctttaaaacaggctgacgaactgcatgatgttgaagatcaaatcagcttaaataaactactcactgactcttaccttgcattacaactgtataaacaagcatttgaatcgcaaagccgctatcaaacccttgaagataataccggtaaaaatcagcacgacttaaccgtggccgcaatgcaaagccaagtggcttttatgcgaaatcagcaagaaatcaatcaattgagtgctgataagcaaattcaagccgcccaactaagcgaaagtgaatggcaatttaaagcgtggttattgggcttaagctgcgtgattttactgatatcaggctttggctaccgctcatttaaaaagcgtaaacttgccagcgaacgagcacagctactccaagaagttgttgataaaaagaaccgcttactagccgatgtatctcatgaaattcgcacgccactcacagcactacaattgcaagttgaagcattgcaatacaatatcgccaaagacgttgatgcctcttacgatgcaattaatcgaaaacttaccgatataaatatactaatccgtgatatccatcaactagcacaagcagattcagatagcctgtaccttaacttaaaaccctacttacttgctgatgtattatccgtttggcaacaagactttgctgcttttgtagaaaacaaaggctttgaatttaccagtaacattcgcgttgctgctgaaatcaaggtgacatgggatatcgataaaattaagcaagtactgactaaccttttatcgaacagtactttttatactgataaacccggcaaaattaaatttgtagcgacagcctcagagcagagtattacttttagtattgaagataccccacccggggttactgataatcagttgcttgaaatattcgaacgcttataccgtgttgataagtcgcgcagccgtcaaacggggggctcaggccttggactggcgatttgtaaaagcctgattgaaacacacaaaggcactataaaagctgagcacagtgagttaggtggcgttaagatcctcatttgcttaccgcttattagtgaacaacaggtttagtatcacaactccctgaaatcgcccctaaaccgggcggtttcactacatctagcccaattaatgccgaccaaggtcgcatattatttaatcaaaaaccgccctatattttttagtacgttgtacaaatctctcactaaaaagtataggagcctcacaatggcgggcgaatatcaacaacaatatcaacagttccagcgcgatccgggtcagttctggcttgagcaaagtaaacgaattccttggtttaaagagccaagtgctccttatcaatatgacgataatgatttttaccattggtttgccgatggtcagctaaacacttgttacctagccctcgaccaacatgtcgaagcaggctttggcgaccaaactgcactgatttacgactcccctgttaccaatactaaacaacaatacacttatggcgagttacaaattcaagttgctaaatttgcagggctcatgcaatcccttggcgtaagtaaaggtgaccgcgtagtcatttatatgccaatgatcccacaagcggttattggtatgctggcatgtgcgcgcctcggtgccattcactccgttgtatttggtggttttgcaccgcacgaactcgcggtgcgtattgatgatgcaaagcctaagcttgtgcttactgcgtcttgcggggtcgaaatcaatcatgtgattgagtataagccactgcttgatgaagcactcgaaaatgccaagcatgctgttgaacactgtattgtatttcagcgtgaacaagccattgccgagatgcaagatggccgagacatcgattggcaatcagcctctgaggcagcaagtgcagtcgctgcagtacctgttgcaggtgacgacccgctttatattctttacacatcaggcactacaggaactcctaaaggggtggttcgagaaaacggggggcacgcagttgcaatgcattacagcatggaaaccgtgtatggcatgaaacccggtgaggtattttgggcagcttctgatattggctgggtagttggtcactcgtacattgtatatgcgccgctcatttatcgctgtgccaccgtactttatgaaggcaaacctattagaacccctgatgccagtgcgttttggcgtgttgtcgaagattataaagtcagcgccttattcagtgctcctactgcgtttcgcgcaattaaaaaagaagaccctaacgctgagggctttaaacaatacgacacctcaagtttaaagcgtttatttttggccggcgagcgcctcgatccgcccacctatgagtggctaaaagacaaaacgggcttgccagtactcgaccactggtggcaaacagaaacaggttgggcaattgcgtgtaacccaattggtattgaacaacttgccactaaaccgggcagctctacggtaccgacaccgggctttgatgtacaaattcttgatatgaacggtgagcagtgtgcagcaaacgaaagcggcgctgtagttataaagcttcccctaccaccgggctgtttacctacaatttggcaaaacaatgaacgctttcaagcgggctatttaagcgagtacccgggttattacctctctggtgatggcggctatattgatgatgatggttatctatttattatgggtcgtaccgacgatgtgattaacgtggcggggcaccgcttatcaaccggtgagatggaagaaattgtagcagcccaccctgctgttgctgaatgcgcagtatttggggttaatgatgcactcaaagggcaattacccatggcgatgatagtgctcaaagatgattaccttggcgatagcaaagaagtcgagcaacagttagttcactcggtaagaaatcaaattggcgccattgcctgcttaaaaaacattttgcatgttgagcgcctcccaaaaacccgctcagggaaaatactcagaaagaacttacgccaattggtcgatggtgaagaactacaaattccatctaccattgatgatgcgagtatatttgatgagatcaaccaacaacttaacaatcgctgatctgcgtttgtaattttgtaatgttacccaaaggccttgtttaaggcctttattcgttttggcctatggcttgcaattttactagtaagttagcaaacgaaaaggtggttaacatggctgtaatcgcaggttatatccaattcaatgaattaggcaaaacagaatttcattatattaatcaactagctgatgtatttaatcgctataaaaaagcagatgttcagcgctttgattgcgataatggagctatttttcaatatgattttgatgcataccaacaagcgagttggttgcaaactgagtcgcaaattgcaacgctgattggtcatcccttactcagtagctctcgtagtgatgatttaaaggccatggcaaatacaagctcgctcaacacctgcttgcagcaatgtgaaggagtatttagcttttgccagtttaatagccaattaggcagcttagtccttgccacagacccacttggcttaaaaccattttacaccttaaaaacggcgcaaggcatactgttttcaactaacttggggatatttaaacaactgagtattgagcttgaaagcgatgccgaagcactcacagagcttgcggtacttggctacccgcttttagatcacacgccttataaaaacattaaatgctcatacccaggcgaaatattacgttttgatgccagccacggcgtggtaaaacaacgttactttgattgggtcgcccttgccaaacaaaaccgagaggtgaccgatgcaattgaaggcgttactcaggcatttcgcagtgttgtcacaaaagcgatgcacaccgatagaaaagtgctcagcaccctgtcgggcggcttagattcacgattaattaactgcgagctattacgccaaggggttcagctaaagtcgtttaatttttcgcaatcagatagccaagatctctactgcgcaaaacaatatgcttcgcaaaacgcccttaaacttgaagttgtgcaagtacgcgacacgcaaaagctctctgttgaacagcgccttggcaaatactggcgcaaagcacatcacaatgaatataaaaccgtttcaagaccacaaattagttggtctggtaatggcggcagtgttggcttaggtgcggtgttttatggcgacgctatttatgctgcggcaaaagaaaacaatcttgataaactcattcaagcttatttagatcagcagtacgcttatttgccaaagtcagtggtacacaatgcgtctatgctgcaacaaaaactaattgataacctaaaacttagttttaaacccttggctgaattaccactcgaaaaagcattccaattgtttttgctactcaatgatcagcaccatcatttgagcattccaaacgagcaagtatgcgagtttaaaatggagttctttcatccgttttattcgtggaaagtgctgcaatatcctttagcagtctcagttgaatatgtacgtaaacaccgtttttatcagcgctggctgaaagccagttatccgcgtgccatgcttgcaccatggcaagcctatccgggccatatgccctgcccaatcaaagtaaactaccagtcgcagtggcaatttaataataacaacctgatgcgttttggtgagctgtttaagctatggtacgagatcatgcgctttgaccgtcatcagcttataaaacgcagtcactttaccgcgttatgtatattgcaattagtacatttaaaaaatgcacagccaaatattcgcatcgcccagcggttctgtcagtggtgatggatactaatcggcaataatacttaatcatgtaagggcattgttatgaaatacaaaaacaactttataaaaaataatatttcaggctagaatcaagtaagttattaatagttcaagctgaaatttcaatgagaaaatggatccttgccctgcttcctttaaccgtattagcaggctgtacctcggtaagtaaagatgaatgtttacaagccaattggcatggtattggttataagcatggtgcagatggcactgagtatcgtgatggcatagatgccttatcacaatgcagcgaatatggcgtaagtgccaatattgctgaatataaagtgggatatgatcagggtctggcggtatattgtgagcccgaaaatggctttacccttggcatgcaaggcgcatcttacaatggcgtttgtaacagcactgcttttcgtaaagcatggcaagaaggtaatgataggtacgaagtacagcaaagactgatatacattgatgagcgaattgacgacattgaccgtcgcttaaaagatattcgcgcagagcttaatagcaatcagcttgataatggccagcaaaaagagctttatcgagaacgcaaagatttagaaaacgaacgcaaagatttacgcaaagagcgcgccttactaccgcttttaaataaattgccgagtgtcgaaatatcaaccgagtggtgatgctttatgtttaagcttcatcttatacatttgctcgtcagctgaggcgagcaactgtttggcatttttaccatcctctggaaacatcgcaataccaaaacttgcactaacgggtaacaatgttgcgtaacgcttggcaactgcttcaaccgctttttgacagcgctcggcaatatcctgacaaacaaagcgttttgctaaggtcggcagaagaataacaaattcgtccccgccaatacgcgccaacacatcattatctcttaactgtaatgaaagttgctcactgatatctaacagtaaattatcgcccttttcatggccaaaagtatcattaacaagtttgaagttatcgaggtctatatagattaacgaaaagtgattatgctcgacgggcgcttgcattgaaaatgcattcaattgaatatctaagccgcgtcggtttagtaatttagttaatgggtcttgattgactaattcacttaataattgtctgtttgccacctcttgggaaatatcatcaaatgcgccaatgtaatgacttacattgccgctgtcatcatataaagcatcaatcgataataactcaggaaagacctcgcctgatttacgtttattccacacttctccttgccaagagccatcagcaagtaatgtctgccacatagatttgaaaaactcacaaggatgacggctagaagataaaatggcagggttttttcctaaaacttcagattttttaaaacccgttatctgttcgaaagcagggtttacatcaacaattttaggttctgaggtggtgattatgatgcctctactggttgtcgaaaaaacagctgtaagtagttttatttgctcgttatttttaatttcttcgctaacatcttctaagtacccattccactcaacacttccatctttatgtgctacaggtgaagacttgccttcaacccatattaatcccttggttggatgattaacccgaaaaacctcatgccaatcgtctaaactaacgcgtgaccgcacaacacttttgtaaatacgttcataatcatctggatgaacggtgtctgttaagatactggctgattgttttatttcttcaggtgtacacccataaatatcaaccaccttagttgttgcaaaaggaaatgatgcatggccttgctcatcaattacaaattgataaacaaacccgggaagattgtcagtaaaggtttgtagcttagcgtgcaaaaactctatttcacgttctttgagccattgttctgtaatatcaatgtgaacccctagcatccattcaggattacctgcttcatcccagctttgcaccttacctttatcaagcacctttacccagtgcccttttttatgcttcatacgaacgtcacaaatataacgctcagactcaccacgaaagtgagcattaagaagcttttctgaattttctaaatcatctgggtgggctaaattcatccatgtttctatcgatacaggctttaattcgtctaaggtgaagccaacgattttagcccacttatcattaaaaattgtttcgccggtttgtatattccaaagccaaatgcctgcatcactgccatcaagaattaattgagccacatctaaacctagcttagatttgaccgtctcatagccttcactaaatatcatagttttccttgctcgctaacccaatggcaccaatcaagcctctatatttatattagttaacaaacaataaaacctctaacagagtaggcaagtatattgatctacaacagctaagtggctattggccaatcagctgcatcgacaacatcaataagctcagagacggtaacatctccttgccatttgcgaatgtaacgcgccaaaggatcataaagtgctgtttgcttattaatatgaaaatgtcgacctcctctagggtcaacgccgacacccgcaatgtattgccaattcccccaattagctgctacatcataatcaatgagctgttgctcgaaataagccgcaccatagcgccaatcaagctcaagttcgttgaccaaacaacttgccgcaatttggcgcgagcgattagaaatatagcctgtcgcattaagctcatgcattattgcgttcaccaaagcaaacggcgtgcggccttggcaccacgcctcaaagcgctgactattaaaggtagtcagaggcgcactgtgcttttgccctttaaaatggaaaagttttgcaccagcctttactgcatgccacttaaagtattcgcgccacagtaattcgaactttatccaataactagactcattcgccccgtttttaagctcatatacttcaacctctctgtacagctgttttgcgctaattgtgccaccagcgagccatacactgaacttggtactgttactaaaaccatctaactcgttacgcgtttctttataactgcttggcgctttagacgaaaagtaagcattgcaatgctgctgagctgcaattagaccacctttaaaactgcctgattgagcaggaacatcatctatagcttgctcaggacatagctgaactgggttaggcaaaaggccgaccgctggcaaaggcgctgctataaaggttggctcagcttctaccttgttacgaaaagcagtaaagtttattggtaggttatcaagttgaaaaggtaagtcacttgccttgaacaaggtatcttgctgataggttttcaccgtcacatgtgggcataatgctttgattttattgagctgcttttgctcataaacaccaacctgctcagtacaaaccaatgtttcaatttcatatttttgcaatcgctgactaattacttgctcaggctcaccagtgatcacatgcagtgtttgcccaagcttctcaactgcttgtgcaaatgccgcgagactctttcgtaaaaagttgaatttatgcgtaccaaacgatttcgactgatagttagtttgcctaaaccagcgtggttcaatcacaaacactaaatcaagctcaccatcaaaatcagctaactcagatagaatttcattgtcgactaggcgtaaatcatttcgcagccaatataaaacacgctttttcattacttactctattagaaaccttaagaaatcatacgtaagccagctatttcacgattaatttcgccttagttgattatcatatcccttattaatcataaccttacaatcttcaatcaagtttaagttttagttaagtttttcttaagttagcgattttatgctgagaactgtaaagaatttaaaggttgataaagcaaatcgccgcgtctccttggtatttagtaggcataacaaagatgaataaaataacctccgttttattattttcatgcactgctacagggacagtttatgcaaaagaacctttaagcttagatgttgtttgtgaagtaaaaagcaaacctacaactgagttgagtgaagataaagacatcttcgttgataaactcaacattgatacacacacgatttttgacgccaatgatcctgaaacgactgcactgcaccgctttatcaattggctacatattgataccaagaaaaacgtaatcagcgaacagataacctttaaagaaggcgaccaagttagcgaacgtcagcttcaagaagcagagcgcatcctacgcagcaaaaaatacttaagagatgccaaaattagctatacaaacgactgccttgaagatgaaccccgcgtggtgcaaatcgatacgtgggatacctggagtttattaccaaccattaattttgggcgtagtagcggcaataataagtacagcttaggctttaaagaagaaaactttttagggtacggtattcgtgcatcattaaagtataaatcagatcatgaacgctctggctaccactcagtactgcagatgccagtgccttggcaacctcatgcaactctcactttacaagctgatgattacgatgacgggcaagtctttttagtggattatcatcagcctttttatcaacgcagtagtgacgcactaatgcgctactttgcacaatctcaaaagcaaaaaagttatatctatcaaaatggtcaaactcgttcagagttttttactgatgaattaatcgcccagtttgcttacggcggaattttatcgcaagacagccagcaaaccttccactggcttgctgggattgattaccaagatgtcagctaccgcccttttgaaacagagcctttgcttgcaggccttaacgattacaccattgcagcgccttgggttggattacattggctagaggacaattacgccgtattgcacgatattgacctaataaaccacaacgaagacgttaacctcggctgggagctaaattcaaagtttgccatcgataccgtaaattttggccaaggctttttatatgatactaaccttaccaaagcctggtttaacaataacgccttgtatcgatttgccgctggactcaaaggcaatgtaggaactgagcttgatgatcgcttagctatctattcaaaagcacaaatgaactatcgctggtcagactcatttgctttttatgcgcatgtaaatggtcattggcaaaatcatgaatttgctgataaaccgctggctgttggcggtgaagaaggcatgcgtggttttccagaaagttaccaacatggtacttcaagcttacaagcaacggcggaactaagaatgtaccctaatattaatttgtatcagttcgtagatgtaggctttgttggctttgttgatgttgggcaggcatttggcagcactgcaactgcgaatatttcagattcaatgctaaccagtgcgggtgtgggtattcgcctatattcatcgcgctcaagcaacgataatgttatccatatcgactttagtacgccacttggcagttaccaagacgttgattcatggcaaataggaatgtcggttgaaacaactttttaagcatcttgctctttactcataagctcgctcatacgctgcatcagctcttgctcactgaggtcttctttgtgtgtgcctatagtccatatatggccaaaagggtcttctaaagtccctgatctgtcgccataaaattggtcatgcacggggcgcagctctttcgcgccaagcgacaaagctttagcaaaaacagcatcgacatcttcaacatacagcataatgctcaccggtgtaccgccaagttgttgcggcgatttaaattgcacatcttggcaattatcagaaagcataatatgagagtcagcaatttttatttcagcatgcgccactccaccatcaggcagaggcatttgcattacaagttcagcagcaaaagcttgtttgtagaactctatcgccttagtggcaccttcaataaccaaatacggggttaccgcatggaaaccttttgggattgcagaaacagccatgttacacctcaacgttaaatgtgtgagttataaaggtagcagctgttgtgcaatttcacgttataaatttactttgataatgagtttgcaaaatctggtctgggtagcttttcgagtatggcgtataagtaaatcaccagaaggcaaagccctcccgcgacaaaaaacaaggttgggccatcgtaataatctaaaattaaaccgccaccgagcggcgctaaagcaaaccctaaatcgtaaaacgaagccgcaccaaagtacgcaccacgaagatgagatggcgcgagcctatcgaggtgcacgttcatcgtcggaaataaaatggtttcggccaaactcatcaccactattgcaccaatccagccccaaaataaatcgattggattaagtgctaaccaaaactgcgacaccattaatagcactaaaccaatttgaattcgcaccgttaggctaaatcgtgccatcatttttaacagcaaaaattggcttgaaatgatcaccaatgcattggtaaatatcagcgcagaaataagtgcaagtaggtcgggtgcctctgcacgagtgaggtattgtatgagtgaactatccatttgcgcataaataaacatgcacaaaatattggctaaaattaaacattgcagcagtttatcggcaaataaaatacgtaagatttgcttgccctgtacagctggctttttctcttcgggctcgtcaattgcggcagtattttttgcagctttatcactaaaattaaagccccaaacaagtagcaccaataaaatagcaaatgctgctgcggtaatataaaagctcgactgctcacctgttaaacctagccatactccagctaatggccccaccgcacagcccacatttacaataaaatacagcgactgcatggccagctcgcgagtttgtgcatcatcaataatatcgccaatcgccgcactggttaatggtcgccaaagtgcggttgctatcgagcataaggtcatcacaatcacataccctgctaccgtttctacctcagctaacaacgagaaagaaatgatatacagcacgccagtaatgtacatcagcgtatgccggcccactttatctgataggctgctaccaataaaactggtgaacaccgaaatcacggcagcactggtaagtaccaaaccgacttctgtcgccgataacgcaaacttttcgtacaagatcaccgcaagaaatggccacaccatgtaataactgccacgggtaataaacgagccaaataagaagatccacataagcacaggaaattgcttaaagcgcgctaaagagatatctgaattcattactaaaattttaattgtgatggttaaaacaatatacctcaataacctctgctaagagtatttaatctacagctcatttgtaacaccgcattaattagctaagaaccaaaacaactcaactaaaaatattatttaatgagttaaaacccaaaaacctaaatacgaataattattgattgtatttttaatttctgtactatacgcaccgttcctcaaaaggaaaatcaacataaagaactggaaacctacaatgaaatcaataaaaccaagcttactggcacttgccatagcaacacatttttcagcctttgctgatgacgctaagcctaaacaagatatggaacgtttagtgattactgcaacaggctttgagcaaaaagttaccgaagcacctgcaagtatttcaattatcaccaatgaagatattaagtctcattccttcacctcagtgcttgatgctgttcagtatttagaaggtatcgacattggtacaactcgtgataaaaccggccaaggcagtgtgagtatgcgtggtttaacaggtgaatacaccctgttactcattgatggtaaacgccaaaataaccacggcgatatttatccaaacaattttggtggcaacgcgtttaaccacgtaccaccagttgatgccattgagcgtgttgaagttattcgcggccctgcatcaacgctttatggtgcagatgcactgggtggtgtaatcaatatcatcactaaaaagcacactgatagctggagcggtgctgtttcatttagtcgttcattacaacaaaacgatgattttggtgatgacatcaccactgactttagtgtgatgggcccgcttatcaaagacgttttaagtttaggtgtacgcggcagtgtttacgagcaacaagcatcatcgccaacatttgaaccagcaaccgatccaaatggtgttgtacatattcgttcattaggctttgggagtggtggtcgtaccgttgataacaccaacgagcagtatggctttacgttaacttataccccgtttgagtctcatcatttacgttttgattatgataactcaagccaagtttacgacaacacgccaagctacgacattgaatcaggcaccattacttacccacttggcactaaagataatattgaatcaatttggcaagaccgccgcggccaagtaaacccgcgtgcaggttatgcagcagaccaagagtttgatcgtgaatggtggtcattcagctacgatggcgagcttgattgggcaacggtgaaggcctcggtttcttatgttgatacgcaaaataatggccgtactttaccgctaagtgtaagcgagcgattgaagctgcaagcgatgtacgatggtactggcgaatacgaaggaatggacgaacaagcacgtaaagacttagctgaagaaactttcctaccacgccctgctcgcccactagaaagcagccaatatacctatgacttacgctttgatattcctatcacaggcagctttggtagccataatctagcaattggtggtcaattaattgatggcgagttaaaagacggtgtatttggtcttgaaagtgaccaagcaggtaaagtacaagagcaaaacatgtactcaatctttgccgaagataactggatggcaaccgacaactttaccttcacattaggtgctcgttacgatgaccatgatgtatttggcagccaagtatcaccgcgcgtttacggtgtatataacctctctgacacttggaccttaaaaggtggtgtaagtacaggttataaaacgccgcaaaccaccgatctttacgacggtatcaccggatttggtggtcagggcacaagcccatttgcgggtaacccagatttagaaccagaaaccagtgtgaactctgaagttgcactttattggacttcgcttgatggcgatcacaacatgaatgtgacttactacaacaccaagtttgaagacaaaattgcccgcggcgacactattttaagctgtgaacaaactaacgatgtacgcccttgtgtgaacttaggtcagtacgatcaacttggctacgatagctatagccaaaaaatcaatatcgacgaagtagacctacaaggtgttgaaattgcaggccaatatactatcagcaaaacagtgtctgttaacggtaactacacctggactgatagcgaacaaaagagcggcccagagcaaggtcagccactaacgaactccgctgagcacatggcaaaccttactctaaactgggaagcgactgactttatgaacctatacctacaaggtgtatatcgttcagaccgttaccgcggctgggataacgtgcacgacaaagcgctgtactacaaaaattacaacctacttaatttaggtgcgcagttttatgtaaatgagtacgtgcaaatcaatgcccgcgtaaacaacctattagacgaagatttcacctcatatagcactagctataccgacctaaatggcgatggtgagtatgaatacctaacaggtcgtggtgtaattagtgaagtcacattcacagacgactacaacgttaaagataaaggccgtaacttctggattggcgttaccgcttacttctaagaaaactccctgacaatagacagcatgtagccatatgctgtctattcttctttctgtcactaaactgccaacttcacacactaagctgatgatacctgcgtaagcttatttgtcggtctatggaacatgtccttacagccagcggtatcagtattagttatcaagatgaaggcgatgaaaacgcgcctgtgatcatcttgattattggcttaggtgctcaatttaccgtttggccagagtcgctttattttggcttagtcgaaaaaggctttagggttattcgttttgataatcgtgatgcagggctatcttcatcattggatgaattaggcaagccaagtcttgtaaagcattggcttagccgccgattacccattcgcgcaaagctgccctattcgctcgatgacatggctcgcgatgtaaaagaattaatggatgcactggctatcaaaaaagcgcacttagtgggggcttcgatgggaggcatgattgcgcaaattgccgcggcaaagtataaaaaacgtgtactgagcttaacttcaattatgtcgagcagctcgccgttatcgttttcgggttcaaacattaacctgttggtaaagctcgctaaaatacgcccccgtagcagtaataaagaagctgcgattgattacaatgttcggctgaaccaactcattggcagcccggcctacccacaagatgaacacgctttatatgccaatgctgagcgctatattgagcgtgccaacacgaatcaaactggctttaaacgtcagcttgcagccattgccgcaacgccctatcgcgagcaacttttaaagaagattaaagccccaacattagtgatccacggcagtgctgatcctgttatgccactgtctgcgggcatcaacaccgctctgttaataaagcgcagtaagttaaaagttgtgcccggaatgggccatgattttccacccgctttaatgaaaaaaatgactaaatggattgccaagcatgctaataaagtgaactgtaagaataattagaattcatggctatgcggaccaactatattaacagcttccagtaaattgaggcactcataaaagagcgcctacagaattaaacactaaactgatgccatgggcctgttatagctagcgttttagaaggtgagtaaacatttacaaacaaggtgcttccatccggtgaaaaacaggcacctgccagctcagtttgcgcaaccaaacgggcaaaattataaacttggccttgaggtgtaacaccacgaagatggttatcaaccacatcggtgtattggtcttcacagacaattaaatgcccattaggtgacacggttaagttatcgccaaagttgtagagggttttactggtactttctacaaacaacgagattttaccgggttgctgtgcttctttatcggtgccttcaaattctgacggttgatatttcataacctgaccaagttgttttttaccaccattggtacagcaaaaataaagctctttatcaccccaatgaataccttcaccgcgagcaaacagtgcagcgccttgcttgtatccacgtaatcgtaagtcgtctttcgggctttctgggttatctagatttacccactcaacctcaagctcttgatgtagcctcatggctttattgttccagttacggctatcgaattgtggcttaccttttaccaccatagcctgtagttgcccgcctttatgcagcttgccatactcttttggaataaaacgataaaagacgctatcacccttgtcttcagttaaataaacaatgcctgtgcgcggatcaacggcagccgcttcgtggttaaatcgacccatggcttttaacggctcaggtttaattaagcctttgctacttgcgggtacttcaaaaatataaccatggtcttggttaaatccatcggctttagtatcggtggtttcttcgcacgtaagccaggtgccccatggcgtgataccgccagaacagttacgaatagtgccgaccaatgacaagtattcttgctctttttgatgggtttttaagttataaacgatatgacttgtgccaccgggtaacgccaccccgtcactgttagtatcaaaagccaggggcgttttatggttagcaatacttgcttcagctttcgttaaatcttttggttttagctcatggtttcgcactaatgcaacacggtcattaccaagtgcaaggcagcccatgccatcggctttgtcaggtacagtaaaaccatcagacattttctcacctaggcttgaaacgacttgataactgaagccctcaggtaaatcgagcaatttatctggatcgggaattaacgggccaaagccgacagccgttgtttttaaatcacctaatgacacctttcctatggcactttttgataatcctaaaaaggctaacgtgcccgcccctactaaaaaatctcgacgtgaaaccatactaactccaagctaaacccaagtttatcatacaaataaaatggcattataaagcaaagaaacgataaaaagttacattatcacaatcttcacgaaattgtcataaagcttgattttagtgattgaacccgtgcagcattaaaaaatattgatttagagttttcgtaaaacgtgctttctagacggcgcttgcatttaacacacgttttgaaaacttacgtataaaagttgaagatggcgacatggtagtcccaatgacggctaacgttttgatgcaaattcagtaactgagacatggctatgtatcagcttactgctgcctatgtgtttttataaatcagtaataacaactaaaaagcttaaactctgtggttatgcacgttcatccttgggtgattccattactacatgcgttgtaatggtgcgtacttgtgggatagagccgagcacatcagcatgaaacgctttataagacttaagatctgccgtctcgactctcagcaaatattcaaacgagccagttacattgtggcactcttttacttcatcaataaactcaagggcttgctcgaatgctcgctgagataccgttgagtgctcatttaaaccaaccccaacataagcgataaatcctagacccacagcctgattatcaatgaccgcccgataccccgcaataaccccaagtttttctaattcttgcactctacgaaggcatgccgatggcgataaacccactttatctgccagctccgcattggcaattcgaccattgcgtttaagctcatgcaatattctgtcgttaattttatcttttttcattttatattgtgaactttgaatacatataacaacattaagcgcaaaaattgcgcttaattcaacttataattgcataaaattaaagtggagagatagcaatgagttttgaaattataacagccctggcgttatttgccttggtgtcatcaattactcctggaccgaataacttaatgttgatgagctcaggtgccaactttggctttaaaagaaccacaccacacctacttggcgtgacgcttggctttatgttgatgctggttttagtgggccttggcatcatgcaactatttgatttatttccaccaagctacttgatattaaaagtgttttgtattgcttacttactctatctggcgtttaaaattgccacaagtagcgctcaacaaaaagctaatagtgaaagtaagccgtttacctttattcaggctgcactttttcaatgggtgaacccaaaagcatgggcaatggcattaagcgcagtaagcttgtatgccccagacaaaaacctcacctctgtgttaatagtaagcctcatatttggtttaattaatctgccatgcgtcagctcgtggactctacttggcgaaaagcttcaacactggcttgccaacccaaagcgcttaaaagcatttaactacttaatggcaatactattaatcgcttcagtgatgtttagtttgttttaaatgagcaagatttgctaggaagtataacgtacacagcctttggcagtcgtattttaagattttaagatgagaaatttaccctgtgctaagatttatttatctagatcttttcagtgcgattcatggctagtaacgtagagaattacttttaccacggctttttcgtcttcttacttattacggtagtaacctgctccattatagctacacgcctgatgcgcagtagttttaataatcgctcaatttacctatttaatctattcttttacctcggtgtaattggctttacatggctttggatccaagatctattcaaccttgcgccgagctttcgctctggtgtggtaatttatatgatctccatgacattgctgcaattatctatttataaccacgacgaactctgtcgatttaataagataattattgctcatggggctattttttctgtatttgccctccttactcaaaatattaaccaactggccttagtcgaagcttgttatacattaagcgtgctacctgcactgatttactacacaacaaagcgtgctgtatctgagaaaaatataggcaatactgtgttgtcgatggcgcaatgtatcttactgttagtgcccatttcacaactgagtatcattacccatgagcacaacttagcaaccctttattcacttactgtaattgcccatgcaactgtatttgttatgacaggtcttggactcatcacgacactattagttgacgaaaagaaacgttatttggagctgtctttaaaggatccgcttaccggactttataaccgccgcggactgcaatttattatcgaacaacagcaattattcagcccgaaccaaacttctagcctttatgcctgcgttgttgatattgattacttcaagcaaattaatgatagatacggtcacgatggcggtgatctagtactcgaagtgttctctgatttaatgaaacaccatttaaaaaaagaagacttatgttgccgccttggtggtgaagaattcttactgctattctttgcagccgacatcagctcagcgagacaatttttagagggcctacgtaaaaccatcgaaggcagtcaaatagcttttcaagagcatcgtatatcggttaccgctagttttggattaactaactggcaagtaaatgacagctttgaaagcttagtgaatcgcgcagacaaagcggtttatgaagcgaaaaataatggccgtaatcgagtcgaaattaacacccgaagccagaataaagaaccaaataaaccaaacaggtaaatgcttttgtattaatcttgtaaattcaaactctaccactataattagtgcgtgcttatacttaaattgcaatatgtagtgctatgtctttaaaagtattattaaattttaaattaaactggttgtttatttgtgccagcttatggctttttgccctgccgattcaggctaaatatgttgttgctgttgtgggtaaaaccaaaaacgatagcttctatcagcaagcctttaaagggtgtgagcaatttgcaaaacagcatctcgattttgaatgtatttacgatggccctaaagactttcaagatatccgcacgcaagtattagtgatcaccgacctcgtgcgcagaaacaacattagtggtttattaatcgctactacagactctaattaccttgttgaacgcgctttaaaaaagcttaaagacaataatattcctgtaattacctttgactctgatttgctcgaagatgatcagcagtatcgtttagcctatgtgggtaccaataattttgattatggtgtggctttagggaacgaactaaaaaaattcactgacaaagaaattaaccaagtctgtattcaatccggacattccacaacacctaatttaaacaaacgcattgaaggtgttcgttatgcgttatcagggcaaaaagataaacgcttaactggtgaaaatggctggagcgagtttgaccgctgccctttatatagtttaggaaaacgtgaagtatcactgggtcagctcgacaaactacttaatattgaaaacccaccactatttttagctgtagcaggttttgcccaatttaatcctaactacgcaaaagtgattgctaaacagaaacaacgtattgccagtaaagaggtggtcattgtttctgccgatacagaacaaatgcaattagaagtattaaaacaaggattatcatcggctaatattggtcaaaatccatttgaaatgggacgcctgtctgccgaattgatgtatcaatacctaacaaaaggtgagcgaccagccaagtctcactactacctagactttcattattgtcagcaaagtaatgcaggtacatgcacagttaatcactaaaactttgatctcactaaagtgcaattaactcgataagcgctagacttaccacaacttgaattaactgtaaggatttagccatgacacacctagttagtgatttaatgacgccagacccatttgccattagcgcgcaaaataccctgcatgacgcgcataatctaatgaaagagaaaaatgtccgccatatcccagtgatcaacgaacacggtggtttagttggcatgttaacgcaaaaaatcatgattgctcaggtaatgaatatcatggctaattacagcgccagcgcccttgaacgcaaagaaaagcaaactaaagtggttgatattatggccactgattttaccagtatctcgccagagcagccgctacacgaagttgctaagttttttgttgaaaatcgtcatggctgcatgcctgtggttgataaagataacaacttagtgggaattctaacctcatctgactttgttcgtttagcggcggcattactttcttaagtcgtaaatttgtatctgcacactgaattttttacagaaggtgtgcagagttttcatactcatacctcatcacaaccactccacctcaaaacaaaataaaattaaccctataaattcaactagttaacaaaattccattttaggcacaacgtttgcttctacctaatcaagcgcgcttttaaactaaaagcgaaaggaaatttatagataatctcggaggagtaatgagtaattcatcatcaaaaatcgcagaatttacagcacccggtgttaaagaccaagctgcagctgacacgattgcaattttagaccagcgtatggtcgctttaatcgatttacacctcactttaaaacacattcactggaatgttgttggtcctaacttcattggtgtacacgaaatgctagacccacaagtaagcgcagtgcaagagatgactgatacgattgcagagcgaattgcaaccatgggcggcgtacctgttggcacaccgcaatcaattgttgatcgtcgcacttggcaagactactcaattggcaaaggcttagttactgaccatctaacagcgcttgataaagtgtataacggcgttaataaagatcaccgtgcagcaatcgaaaagcttgctgaattagaccctgtttctgaagatatgatcaccggccaactggctgatctagaacaattccaatggtttgttcgtgcgcatattgaatcgtctactggcgaattgaaaggctaaaaccgcaaagtctatccgaagaccccttgcccagcatttgctgggcttttttatgctttgctacagccaacctttatgtttaaagaacaaataaggtgcaaagccagacagcaacatgatgccaatcgcaaacgggtaaccccatgcccattgcagctcaggcatgctattaaaattcatgccataaatactggcgacaacggtcggaggtaaaaacaccacagaggcaattgagaaggttttaataatttggttttgttcgatattaataaaaccttgagtcgagtccattaagaaattcaccttatcaaacaaaaatgtacagtgagacataagggtatcaatatcgagtacaatttcacgtagtgactcgcggtcttcagttggtgcacctaaatgacgcagtaaaaacgaaatatttcggcgcgtatccatcaaacataatcgcaccttaccgttgttatcttcaaggcgcgagatccggctgacggcttcttctaaatctgagtcgtcctcttcaagtacataggcactgagtttttctaactggtgatgcatatcttcaagcatatcagcgtggttttcgactttttggtcaaacagagtcactaaaagttgtttaggattattacacgccacttgccctttacgagcgcgaagtcgtaataaacgaaaatcggctaattcatcatcgcggattgtcagcaaacagttgtcttttaacaaacaagccactgtcaccgtattaaagcgcccttcatttggtgacataaaaagcgcatgcacatgtaggccttcgtggtcgataaaacaacgggaagatgcctcgatttcttcaacatcatcagcaccgggtaaggtgatattaagcgtgcttgccagcgcttgtcgctcttcttcagtcggatttatggtgtcaatccagtgggcatttttaatagaagtaacaagaggcgtatctgcagctggctcagtttctgtgatcacaccttggtctatagaaaaaaatcgtaacatttgccctaccctgataaatcaatttaaaacaaatactatagctgttcacgttaatgaacaatgacaatgcaacgaattaaaaggtaaagtagaaaataattaagacctaacatcatttacttatttcgttttttgaaacgcacaataatcatacctatcaagatgatgccaaggcctattaagcaaggtacaaaagcgctttgcacggcaatatcaaacgctaaaaagtcagggtatccggtttgccaaagcgtccattcataaccgagttttgatgcaatatgttcaccaccgctgctaagtacgatgattgcatcattgttatcggggttaatgcgaagcgtgctatttattgccggctcatttgcgccatcatgaccaaacacaaaatctcccgatgctgttggtgagtaaagcatggtaccaagcccccaaattggtgcgcctaagctaattgccaaaggcgctcgcatagtgctgatcatttgtgagcttaactgtcctttttgaggtgatgttaatgcgttaactaaggctattaaatcatgactacttgccagtaaacctgttgccgctgccgatgcgtattgaaaatgcccagcagcttgcccgcttttatcataagcaggtgcgatgttgtccaactcagttagtacatcgtaactggcatcagtcatgttaactgacttaaagacgttatcattcatccaagttgcaaagtgttgattggttttctcttctaccagcagctctagcatcaaatagccgcccccagaatactgaaaatcgcccacaggcttggtgactttaatttcacgcacacccgttgatgatagcggcttgtttagcgacgcaagcaagcttggtacggtttcatttagctcaatatcagcaaagcctaaaccatcaccaagccccgcagtatgagataacagatgagcaaggctaacagtttgattatcaaactctgattcaggtaactgccagcccgtcagttgctcattaatcgcgcgatctaaacgaatttgttgttgctcagccagagtcatcatgccataggcggtaataaatttactgagtgatgccactgggaacagagtattggcggttatttcatctttgctttttgagtaatcttgaaaaaccacttggccattttcaatcaaaacataagctatgtttgcgtgtttgttggcaatcagcgcctgactgttggcaataaattgctcagtgttgcccgtttcggcgatgggttttaaaaaccaaccactaacaccaccatacacacagattgcagcccaaacagatgacaaaaatagtgttaacaaaattgttttaaaccagctcatactctattccttgtatctcaaagcgaccttaaactacttcgatttgttcaggttttttgataaagaacaccattaaaattaataatgctgctgggaataaaaacacattcaaataagcaaaaataaccgttagctgtaagatgcacatcagtaacagtagaatagaaaacaccgttagcaacgacgacattccatggcgttttgtcagtaataacgcggcggtgatcaaccccactagcgcatacaagcctaaactcccagccgagaccaccatggcaataattgaaatactttcaaccacatcgcgcgatgctttttcgccagcaacggcaagataaacgtcgcataacacagtggcatgaaaagccaataccagcacggctaacacgcataacaagatgcgaacgccttcaacatcgaacatatcttttagtgccttgcgtaaactcaggtacacatagatttcaagtgcaccaatgagtacaaacacaaggtctgaaaagtttaagctttgcaaatcgagcttaagcgcttcgcctaagccatcaagtgtttcgccaaatactgaaatccagtacataggaaaaattatggcaagtaaccccgctgctatgccgggtagtaaatagtcacggttgagcatatgccctccaaaatcctgttgcgttgtaaagttattcgctatcgcgttcatacaccaaaatatcgccgggttggcaattaagctcttcacaaatagcttcaagggtactaaagcggatcgctttcacttttccgttttttagtaatgataaattggtcatagaaataccaatgcgctgagatagctccttcaactgcattttgttctttgccaattctatatctaggttgattcgtattttcatagcctaaaaagtacgcaatggatttatgattgtcaaattttattttacgattatcgtaaaataaagaatgaaaagcataattaacacgcttgtatttaactccgttttaagactaaaaacccagttaaatcagcagtaggttcattcattgttgttttttgtaacacttctcacattttcttttcggcgcgaatcacctaacctgagaaaacacatgcaaggagagaacaatgaaagacttacaaaaattagtgggtaatttaaataaatcaggtgcgctgagtggttttttaggaggtgttgctggcggcggactaacgagcttaatgggcggaaaaagtaaaaagagcagtaaaaaagccgtaaaatatggtgcgcttgctgctgttggtggccttgcttggaaagcctataaacaatactcagaacaaaaagcggctccagttcagcaaacgagttcacgtggttttgattttacccccgctacgctgcctgagcagtcatttactgatgcaatcgacgataatcacagtgatgggcaattattactcatgcgtgccatgattgctgccgcctatgctgatggccacattgatgaaacggaaagacaaaaaattttcgcacaagtagaaacaatgcaattgtctgtgcaagaaaaggccatgctgttcgatgagctaaaaaaaccaatgcaactatcagaattagttgccgctgtgccaaacgcacaaatgggtattgaagtctatgcagccagtgccagcgcaattgatttaagccaagcaatctctaaacactacttagaaacgctggctaatcaattatgtattcctagagaattggtaatgagcattcatagagaacttgccgagtaccaataaaaatggggcctactagccccgtttttagtattaagcctttgctaattagtgcggttttttagtgccgtaacgcaccatatctttaccgttttcatacacatcattgcttacgtaacggccaagtaaaagttgatgtttatcatcaagtaccgcgataaatgggcggccatcactattgttggttgcaagggctacaccggttacattctcaagtcctaaaccgccattttcaactaggcgtaaaaacgtttctaattcgtctaatgtttcaattacatcgttatcgttaatcatctcaaatactcagtgattgctaatgggcgtagcatagcaggattaaaaataaggtgcgaaccagtgcgtaaatttgccaccataaatgtcgtttttttgcaatatttcgcctatcgccatcgttacacttattgctcttcaaacagcttaggaatcaccatgaaccgagccaattattttgctttacaacctcaattaacaaaacatctaattgatcaagaacagttaattaaacaagcagccgaggcaactttcggcttaacgacttgggagctagtgaaattaagagtatcccagctaaatcaatgcgcgtattgtattgctatgcataccaaacaagccagagagtacggtgtaactaacaaccgtattattgctttaagtgcttggcacgacatgctaatttactcacagcacgagcgactagccttagaattgtgtgaaaaattgacacaagcacaaacgattgatgatactttctaccagaccctagaaaatcaatttacagagccaggcttggttgcactcaccattgctattaacgcgattaatagttggaatcgtgtagtgaagatatttaagcctactgtggagtttaatgaataaccatttaacgctagaactaaaaaccccagagggcaatcttggcgagagtatacaggctatatggtatgccaaagcacacttagcaggtgaacaatggctggcttgtgatggtgcaactggggttatttttcccgttacaggtgaagttttattggatgatgaatctcttgcgcatccctatgcatttcaacaaacctcaactcatgcttctaagctcagcttttctaaaggtgctcaattttgtggtattcgctttaacccaaccgtattgccagagctaaaaagaaacgaccatccgctgattgctacgccttcactgtgcgccatagctgaaggactgcaagataacgccagcttagcagcgtttgttgcgcttattagtcgccactttactaataataaaaacataaaccaaagtaacaaacactcaaaacacttaattcgtaaccttattgagttaacaccacttgaaaccgcttatcaacttgcccctctcagtcaacgccagcttgaaaggcaagtaaaggagcaatgcggtgtcacccctaagtattttgagcgaatataccgggtaaaacttgctaaacaagcgattaaagataaccccgaaatgagctttgcagatattgcacttgagtgtggctttaccgatcagcctcatttaatcaaagaatttaaagccataatgcacattaccccggcaaaataccgcagattactgaaagactctcaaacaaaacaaacaaagctcattttgcgttaattcctatataacgaagacagctagaaaagtgccactcaactatttcactttctgtgctagacagacttgatactgagcgattttatttgcgctcggcatttatccataggatagttaacgcaagcctactaaacgtgctgtaactaaataggataatcatgaaaaaagttttacttgccaccagcttaatcgcctcgtcatttactgcatttgcagccaatttaaccgttgaagaactgcgtattgaaaaagccagcaaagccatgccaaaggtgttgagtgctttttctgatcaagtgaatcaatttgaaaaacagtggcaagctgccgccagctatcagcaagcaagtgatcttattgatgattacgctaaacaattatggcgcgatgccaaagcacgtatcattaaaaccaatagcttcgacgaccgtgaactgtattgggcgcgtttactttcaagcaagattattcgcagtgctaaaccacagtttgcaatgaccgacagcgaacaaaccgcattattaacaatgcttgaaaatggcagccgtggccgcaccgaccttgattacagtaaaaacaccgacaaacgcattttaattaccggttttgatccattcttacttgatcgaaatattaatcaaagtaacccatccggtgttgcggcattattacttgatggccaagttattaattacaatggcattagtgctgagatcaatactgtgatggtaccagtacgctacgaagactttgaccaaggtatcatcgagtcattacttgcgccgtattacgcacttaataatgttgatatgattgccactatcagtatgggcagcaaagactttgatcttgaacgctttcctggtaaacgccgcagtgtaacggcgcccgataacgccaatattgtttatggcggtacagccactgcaccaaaaatttcaagcctgaatgatcgccctcttccgggtaatgagtttgtgacttttagcttaccagttaagcaaatgcaacaagccaaagggccattcccaatcaacgacaatcataaagttgtgactctagaaaaagcatttgagccaaaatcacttaaagagttagaaggtgcgattgcggttaaaggtggcggtggcggctacttatctaatgagatttcgtaccgcagtattcgtcttcgtgatgagcttaattcagacatccctacagggcatattcataccccacgtattcaacaatttgaaccagaaacagaagctaaaattgttaagcaaattaaagccatgctagagcacagcttagttgcaatttaaagcgtgaagctcagctataaagcaatagctgagcttcaccctgcaacacagcagttgcggctttgctttttcgctttataaagcgcgtcatccgctattttaaacaagctatctgaatcaaacgcctcattagcagccttactggcaacacctatcgataaagtaacaaacttaacgtcacttcgtccttcatgcacaatagctgcagactctaccgctttacgaagtgtctccgcaacaccaagcgctctctttacatcggtgttactaagcaccattacaaattcttcgccgccatatcgagctacaaaataatcctcgggcgctgctatagtcattaaaactttggccactttacacaacgctctatcaccctgttcatggccataatagtcgttatagagtttgaagtgatcaacatcagctacgataaatgatactgcggtctcttcacattgcggatcattagcaagatcttctaaatgcttatccaatgctcgacgatttgccagtaaagtcattgcatctgtattactgatttgctcaagttttgcatggcgtgcaaacagttcagcgcgctgtgtttcaattaatgagaacagttcattaataccttgtcctaactggtgtaattcattgtcaccatggtaattagcacggatactaaaatcgttgttactgattgccgaatataccgacactttcactttactaagggggcgtaaaacttgttgattaatgtaaagataaaacaatataaacacagaaccagatatcattaatccggttagcaaagaactatcaaataaatttttatcataggtatgttctctggtaggaattgataatacaaacagaaggttagaatatttatcttcaacaccaatatagagttgatcattgtaagtgatcggctgaaaatctgtattttttttgccaaaaactgtggttaaataatcagagtaacgttgtgcttcctcaccttcgtgatagccaatatcctcggcaagcccgggcgttaaagtctcaataaatgcttcatcaataaaactccacaacattaaagagccggtcggttcgcccaatccatctgacttagtaacattataagacacagttaatgcaggcttgttatcaatttgtataaagtgaactttagaaattaatggctctgattgactattcaaatcactcggtaaaacaatcaaatcattatctatcagtagttttggtgtctcaagaatgactggagaataggcttggtactcattgtcaaagcttcctcctgcaataattacagcttcagtatcgtacaaataccaaccattaacgtctaatcgttgaagcgcatctgcaataatataatcattgttgaaccagtctgcattgcgctctttggctgcattatacatgacgtcccaagccgagctgtcgaacaccattttcgataaagcatctatttcttgttgtagttgtgattgaactcgttgaatatcaattttgtcgttttgcttagccattgcctcgaaagagggcaaaatccaaaaatgcctaataatggtctgcgcacctaaaatagcaaagcaagcaaaggtaaaagcaagaagtaaacgttttttcagtctcgttcctataaccataaagcagtacaccaaccacaaaagaacaacttaagtactaccagtataatccccttttgcctgtttgcttgttagtcagctaataatctgtcaataaaggataaagtacgatgccccttactcatatgaaattgtaaatctaatttttacatctaaactcttattatgaggaatcgttagatttacgcatgaaaggtattatttttactgaatttatagatatggttgaacatgagttctcatatgaactagtggataaaataatcacagaaaactcactgttcactgatggtgcttatacgagtgtgggcaactatgataataaagaattgatcatgctagtcacttcactaagtaaacatattgataagcctgttgatgagcttgtacatgcctatggtaagtacctgttaggtcgcttctttgtattattcccacattttttcaaaaacgtcagtaacacctttgacttccttgatactattgaccgtcacgttcatatcgaagtcaagaagctatacagtgatgcagagctgccaagcttttggacacaacgtattagtgatacacaaatgcaaatgttctatcgctcatataacccttttgcttgtttagctgaggggttaatcgaaggagcatgcgaacattttaatgaaacattgaccgttaaaagtgagattgaacctgattatcaatcggccatttttaccctaacaaaagtaatctagcgtggatgagaacctttttaaacgtcgattagagcgagagcgccgagctagaatagaggctgaagcgcttcttgagcagaagtcaatggagttatatgaagcgaatatgactctaaaaaaagcagccgaaacactagagcaagaggttgcccagcgcactgatgacttaaacaaagccaaaatagctgctgatactgcaaataatgcaaaatcaatgtttctagctaatatgagccacgaaattcgcactccgatgaatgctatattaggcatggcttaccttgccttagatactgagttaactgacaaacaatatgattacattgagaaaattcaattatcagctaagtctttactagggatcattaacgatattttagacttttcaaaagtcgaagcgaataaattagaattagaaagtaatgatttcaatattaatgaccttttatccactttggctaacttagccagtagcttgattgaaaaacataacattgaggtcatatttgatattgatgataatattcccgaatacctcattggcgatacgttaaggttaaatcaggtactgttaaacctacttagtaatgcaattaaattttcaaataataaaaatgttaagttaacactcttatgtgtatcgcaaactgatgagaatattcaaattgaatttaaagtcactgatcaagggattggtatgactgaggagcaggtcaagacgatatttaagccattttctcaagctgatatttcaacaacaagaaaatttggaggtacaggccttggcttagtgatcagtaaaaaaatagttgaattaatgggtggcaatattcacgttgatagccagctaaatgctggcagctgctttagcttcaccgcatcttttggtaagtcggctgtaaaaagtaactataatacaaacgattacaaaaacaaaagtgcgctaataattgaacaagaacatgtaaaagaaaggcacctttttaaattactcgaaaagttgggcataaaagttgatagtatttcttatcatgatgacaaactattaaacatagatccctgccaagactatgactttattttccttgattggcatatttttaatgatgaacacagcccccttctcaataacctaaaaaaacagcttactatcaatattaagaaaataattattcttgcctcatttgaaaatcaaaaagtaaaaagtagcttaactaagcttgataaaaatattgatgaaattttattaaaaccaattatcaaagctaacttatgtaaatcactggatcacgtcttaggtattgagaaaaagaaaacaaacaaaattgataccagctgttttaaaaaactcgctggttcaagaattttattagttgaagacaatccgcttaaccaacaaattgcatcacaaatattgcgctcaaatggctttattgttgatattgccgaagatggtattgcggccattgaagctgtcgaaaaagacacattcgactgtattttgatggactgccaaatgccaagaatggatggttataccgcagcgaataaaattaaagagcagccaaagtttgcccatatccctattattgccatgactgccaacaccatggaagccgacctcaccaaagccaaagagtcagggatgcaaggttatatagccaagcctatagaagtacaaactatgtttgaggtcatcgcagagcatttaactcaaaaaccactgtgaacgctaatcagtaagctccacgatttgttgttcaactaatgagttgttctgcttacgaaactcattagggtttaccccgacaatgcttttaaaaacacggttaaaggtagcaagcgaagaaaaaccactttccaatgcaatactgagaatactccaatgacttgcttcatcttttagtaatagcgtttgtgcgtactgaactcggtactgatttataaataaattaaaattagtggctttaaaatgatggcgaatagcgcggctaatcttgtactcaggtactgctaatacttgtgcaaaatcagagatttttaaattactttgtaagtaaagctgcttgttgatcagtgcttctatacccgtgataatcttaggctctacctctttattttcagacaactcagtttgtttgtgagctgtgcttacatcttcagagttcactacttcagtatcaactgattcaggcacgctactatgagcacgtttttgcaaaaacatcactaactgcatcgcaagtacaatcaataacgcagatgaggtaattataagcggctcaaagcgttgaaattcgctttcactaaataaaaacttaggcaaaatgctggcattaaataccgctaaaaagtagcaactagcaaaaatttttgcctgcaacttttgtgtgtcggttttatctttgtaacctcgtaatgcttcccaaaaagacagcaccagaatacttgaagatagcagcactgttatttcggccataccttgctttaatcgccacataaattggctatcagggaaaacctgcacatcaatacttactaaataatgccaagtttggttgaacataattaaccccgcaatcgcgcctgccactgcaatatgtacggtagaaataggtttgtgctcacgaaataaagtacgtgaaatcagccaagacatattacaggtagcacaggtaaataagccaattaaatagctgtaaacacctatacttggtgcactgattttttgcacaccaaccatgcaaagcgagccacaaaatacagcaaacagataatgaatgagctgcttatcctttttcatgccatttagcagcattagccccatacagacaaaaacgagcacgtaataaggggaagtattttgcataactcggcataccttaaattgggtgtttgatgaattatttaccaatcagacaagtttactgtctcaaaatcaacatagcaaaaagagtttgttagtgaatgtgtcaatccctgttttagtagtcataaataaatacagtttttcattgctcaaatttcgaatttgagaagaaatcttgctctagccctttatatttgcggtattagaaaaatgtaatggaattggttatgtctaacagaaatagcaaagtcacgcctttgaaggcgctcgaatacagtaaaaaactttggtttattagcctgctaatggcacaaatttgctttgtggtttacctcattcttggttatggaatgacaggattaacaacaggcctatcaggttggaaccgactaaataacaccgcctatgttgccaatgatgctaccgggaatttaatgtatgcagtgcatgtattatttgcagtcgtgatgatccttggtggaagcttacagctcattgaaacattgcgagcaaaatacagaacatttcatcgttataatggccgtgtctttgttgttttagcttgctgtatttcatttgcgggcatgtacttaatgatagtaaggggcaccgttggtaataccttgatgcatgcactgacgatgtttggcggctttgtggttattgtatcaagtatattcgcggttaaaactgcgcgggctcgtgacttcaacgcgcataaaacttgggcgatacgcttataccttgcagctaatggtgtgttgttttttagattaatgatatttgcatggtttttagtatttggcaccttaggcgttgataccgcgaccttcacagggccagcagtgattgccgtaagcctttgctcttatttagttcctcttttaatcgctgagcttgtccgctatgcagagcaaactccccatacatctatcactctcgctactgcatctttgatggcgttaatatctgttgtatttttaatcggcttatttggggtgacgctggcaaactggtacccttccatcaccgcttaaccaagcttaaagctaaaaagccacctatataggtggcttaatacttttaatctgcattacagtaaattaatacaattcaaataacgggcggccgttttcgtcgaacttaacttccataacacgagcgtggcggtttggatcgtaaagcggatcttttacaatctcttcaagtggacgcgtatctgtttttggcaccacacttggctcacctactgcgtgctcatagtcacgggcatggtaaacacacagtggcgtttgtccatcttcagcaacagtaaaacagttatgaccagggccgaaaattttcttttcaacacttgtttcaagcactggcatacgtgttttagtccaagaattacgatcaagcaagtcactgttttcgtcagcttccatatagcccatgcagtaacatgcaccagttgcgcttgcagagaaagcaatgaagattttcccgttatttttaagcactgcagggccttcgtttacccaaaagtcgacacgttcccaatcataatcaggggttgttagcataaactgtgcggtttttagcttaattggcgattccatttcagctaaataaagatttgatgccgcaaattggccaccagttttctctgcccagcaaaagtaacgcttaccgttattttcaaaaatggtggcatccaaagaaaaatcagtgaacgacttttcatcgccgtcagctgcttgcatcatgccaagctcaacccattcgtcatttaatggatcttgacctttacactcaagtacatacgggcgtagtgcccagatatcttgttcttcgctggctgcaaaatagatataccacttaccatcgaggtaatgaatttcaggtgcccaaatatgtcggctcattgggccgctgtcgtgtttaaaccaaatatcaaaggtctcagcgtcttttaagccctctaaagtcgcagacttacgaagttcaatgcgatcataagtgggtacagaaccggtaaaataataaaagccgtcgctgtgcttatgcacaaacgggtcggcacgttgctctactagcgggctattagtgtgtaatgtcatattgaaacctgatcattgatttttatttgtattattttattacttttgtaagaaccacaaatatagcattatttttagcaaacggtaaaaggaaatgtaaggtgcaacagatttttagaggtaaactcaatatagacaagaaaaagcaagcttaaaaacgcacaatttggacgactctaagcttgctctagaataaaaagggggacatcactccacccttgatttaggtatcgctattgcgatttggctttatattcttcaggttttttcgataacacaacatcaacgggcataacatcacccgaaactttcttaacggttaaagtatgtggccccgctgccaagtcatgcttttcaaaaacaatgctttgtacttgtcgataattgttaccgtcaaaaattgaatacgtcccttgtgattgaccatccaagatcacttctacgtcaccttggtttgcagcttttgaagtagcaaagacaatactcgagccagtaaactggtaactaaaataagctccatttacttcggttatgtgcatatcttgcttatactctccagtattcgtttggcttacagattgccagttcccattctcactgtattggatacgtggatcatcatcgttgactaattcaaggcctgagtaagttgtatcttgcgttgtacccactgtattaccgactgtttggatctgcaccaagcggtcgactaaccaagtgccatttggattaatcgcaacatctaaagtagtaacccccccgacttgcgaaatagctttcacccgctcggcgacttcttcattgctgtattttaggcttcgttttacttgaccccaaccaccaaaaagtgggtcttctagtgatgtatatgtaaagccatgccactgcactttggtgccaagtgctgttgtcacttcgcctgattcaggaatgggcggaagctcattatgctcaccttgggtgtagttactttgtgggtcatttggaatgaagctatagtcaaatccatcactaatagtgataacagcatttggattaccacttcgcactgactcagctaacttatcagcaactgggtaagcattgtttgcagctaattcttgctctgactcatcagcttggtaccaaccatcaaaccaccaaccagcaatattatcgccccatttttttgctcgctcactaataaacccttttaaaaaccaatctggataaggcgctttcacttttgtgcccgtccatctatctcctaaatgagaaggtagatatgcaattagcttgatgccttttgctttaagtgcaagcgccaaatccaaaacaaggtcgcgtgatggggtgtaatcagcttgattcgagttaagttgagttttacaacctggagcaacctcaacctttggacaagcaggtgaatgtaaatcgtatatctcactggttgtagacaaataaccgcgattttgggtcaaggtaaaaatcacatacctgtaacctagtttttctgccttttgtgcataagcgtcaacatcaaatccatttacatagttattccattcatcataatcggtaatttgataccaagcgttatctagcgtcccacctgccagataatgatggctaatgccccacttggcatcttgcatccacctaacctctttaggtaactctgatgagcaagcgctcaatgaagcaaaagctagagcaatgcttggaacgactttgaggagtttattattcattatttctaaaccactgatgattaaaggctataatatgagtctacacaaccgcttttaattaacaaataaattacaaagttacacatcactattctctctatgttttatctgtaagacattaaaaataattacgtttcagatataaaatggctataagtaaacagtgtgctgaagtgtttaaaatctattttttaaacaaaaaaaagccatgcaaatgctctttacaagagcactgcatggcttgcgacacaactaaaaaactcttttgttatacttcttgccttaatgaggctattactttaggcatcttaatttttaccacccaaccagatgcaattatgaatattaagtaataaccaaaggtagaccaatcttcaaacagggcgttacctatgccaagcagtagggaataaataaagataatactcgcgacacaggcaatagcattatctttaattccagctgctattggctctatacctgtgatgtctcttacttttttccatcctctaccgtgaatcttaaggcggctataaaattcaattgttttcgggctgggtgttttgctcgttgtaagcaatgtcacaattaagctaataaccaaagttgcgcatgtggttatcagcatacgaacagcaaaccatttagcatcgccttcatcaggtaaaatatacatcattgcattacctacaattactgcagataaaagtgcacttatttctgaccaaacgttaatgcgccaccaataccaacgagctattaatacaactgaaatcggaataatgataacggtaatatactcgtaggctcccaaaatactctccagctgagtcgtgactattagagcaaacagagtgagtgctagcatgctgatgcgtgcaactttaatataatgcgctttttcacgtcctttcactaaataaggctcgtaaacatcgttgaccaagtatgacgacccccagtttagctgcgtatctaaagtactcatgaaggcagcaagtaacgacgccaccataatgccttttaaacctacaggtaaaaactcatcaatcatcataggataagattgttcggcatcggcgatcgctgggaaatacactaatgacgccacacccacaatgatccacggccaacttctcaatactaagtgacaaaaagcaaaccagtataagctcagcatggcatctttttcgcttcgcgcagctaatgttcgctgaaggaaaaagccaaaccctggggcatagtttaaccagcctatgcaaaccaaaattaagaaagtggctgtttttagatcccactcaaaatcagggatcatttttaacgtatcactattaaagccaggtgacgcttcaactgcagctacgatacctccatgatcttgcaaatcaacataaacgataacagctaaaaccatcgaaccaatgatagcgagcgcaaattgaattaggtcggtgtacacaacaccatataaacccgacatagcggtataaacaacggcagcaaccgctaatacaataagaattaatgtcgtcgcagtaatgtcgccaaataaaggaattgcaaataagggctctggtgagagccctaaaattaccactataatttttgacattgctaacgtaaccgaagcaataatgatgcagtttacaaatacaccatcaaatatcgctttgaatatacgcaaaaaatctgtggctaagctcttatcataacgctgtgagattaattcaatctctgtcagtgctttagagcgacgccataaattagcaaagaaaaatacagagataattaccccgattacgctaacccaccagatccagtttgcgtagatgccctgctcacgcacggcccctgccacaaacaagggggtgtctgacgaaaacgtcgttgccaccatggatgtgccagcgatgtaccaaggtaatgatcgacctgcaacaaaaaaatcagccgtactttcactggccttttttgtaaagagcatccctataacaacggctgctactacataaaacgcaactattaaccaatcaattaagaccatgtgaatctcccaatgcttttaatttttatttaggtagctatcaaattttttccatgtttcagtcatgtctataattgtgccggtttggcgagcttcatctagcttgatagccgttaagccagcctgtaaagcatcaacaattgaaactggtaacggtgttccattttcaaagtaagcaatccaatcggcagccatttcctcttcagcaccgtagtgcatagaaactgaatcatcatgtatgtatgacttatcgataagagcgcctgaggtaatacagtcatgtactttaaagtaatttcgtacaaaatccccttcagccataccaatcgtgccaaacacactgaagtgacgataatcattcggtacgttcaaatttgtatgaaaacttaaatttatgccgttttcatactcaataagcgctgtttggtgatccaccaactccgagtcgttatcaaacacttcatcaataccattccaacgtgacttacgttgatgataaacagggtgtttaccaaggtgtttgttttctggcgtaaatgttttacgaccaccaaaactaacaagtttttttggacggctcttcacaagaccttggtaaagatcaagatcatgacaacatttctcaagtaagaagcccccagacaaaccatggtgtctacgccaatcacgcataaaaaatgcaccatgttctggtggaatatgctcagatgcttcaatacttgtaatgtcacccaatagctttgaagaaacagctgcaattaaatctttgtataaaggagcatagcgtaaaaccatgcctaccagaattttatcgaacgcattatgcttagcgataagttcaagtacgtcataggtttgctgctctgacatgacaattggcttttctgcaaaaatcagtaaacctgcttcaattcctaatctaaggtgctctaaatgcatatgattgggtgatccaatcatcaacatatctagctgctcattagctaacatatccgcaagatcatcataagatcgcattgaaataccatgggactccatgtactcaacttttacagattccggatcagcaaaagcgaccaaattaaagtttgggattagctcatgcataactttggcgacataactcaaacgatcacctaaaccacaaatacctactttcacaattttattcctagcaactgatgcactgttacttacgttagtaacggacgacttacttggtcaatcacttgtgactttgacatgaatgagatttttttaatgaaactaaacgcaagcagggtttcaaatacaaaacattcacatttaaaacatgaaatttacaaagcagactgttaactattgcctagctatgttttggttcaatggagactaaacgttgtttaaaaaacgtttgatgaataatttataggcagcttaacgctataatttttatataaaaataagaattggtttattgaccaaaacgaaatagatgagatatacacatacttttaccgcttttttcagcgatataaaagtgcataagttaacaaaaagtctacacttatgtatgaccaccaacctctttttataagtgattagacgtacccaatgactgagaaagataccaagtataaagcacctgctcttgagaaaggcatggccattatagaattactggcaaaaactcctgaaggccttaaccttacgcaaatttctgattcattagggaaatctaaagctgaaatatttcgtatggtcgcagtactaaatgatttacattatcttgagttttttcagcaagaacgtgtttacagactgtccctaaaactatatcgactaacccaccggtacgccccagtccaccatttaaacaacgttgcatttccgatcattcaaacgctttgtagcgaaattcaacaatcttgtcatttagtcgtgtactccgatggcggcggtttaatactttcgcaccaagattatgacaccaacagtaactgcttaaccttaccagtcggagggcgaggcccgctcactgataattgtgctggtcatgtgttacttgcttttgcatcttatgacaatcgcgagcgcatgcttaaggcatatcaagagaatcaccccgaggtttcacttgatttgatggcactgcgaaatatttggttaagggtaaaagagcaaggccacgaagctatgcccagccctgttttgacaggcgtatacgatatcggtgtgcctatatttgattactaccataatgcagtggccgtgttattaacatcgatacttatgtatcgtgatgaatctcgtaatgctaattttgatgaggtaattagaaaacttaaagacacgtcattgttaatctcaaagaaaatgggctttaacgacgagaattgacggatgcacaactaattatgcgcttacctcacctccccacttttaaatacttatttgtcttttggtacgtgctgtttttctggtgaaaaagcgtttttcaggaatattcagaaaacgtcttgttaacaggtttgcaaccaacttgtttcatttataaaacattaatcttggcaaaattttaactaagaaatctaaacaacgtaatcactaaagcgcgttgacggaattttagtctttatatatcactgaatggacatttgaacattcacgataacaatacgcttagagcgatgggggtcaatatgatgaaattcaccagaagccaaatagccttatctgtagcgctctctctaatgggaagcacagtagcggcagaggagaatacacaagcacaggatgctaaaaatgatgatatcgaagtaattgcagtcagcggcgtaagattgagcttgaaagaagccatcgcgacaaaacgcggttcggacaaaattcttgattcaattgctgctgaggatatgggtaaatttcccgatgaaaacgtcgcgcagtcgttgcaacgtgttccgggtatttcgatagaccgtcctcgtggtagcccaaatggtggcacgaatggtagtacagatggtcgccttggtggtcaatatgtacaaatccgtggcttaccagttgactttacacaggtaacactaaacggtcgttcattatcgtctggccgtagtattggccgtcaattctctcttgatgtacttccttctgagttaattggacaactggacgtgtataaaaccgtttcagcagaccaacttgaaggcggtattggtggtaacgcagatattaaaacgcgtaaaccgcttgatgctgatgaagtaggcttttcgggtgcttggtcagccgaaggtgtttacagtgaacttgcagattcaacagatcctcgcttgtcaggtatcgtgaactggaaatctgacgatgaaaagtttggtgtacttgtaggtgttacctattcagaacgtcaaacgcgtgaagatgaatacttctcttggggtaatgtaaactttggcccaggtacaggagatggtgttgaaattcgtcctgatcttgccacagttccaggtggtactaacgatggtagtatcgattaccctaactccctatacccaattgagccactaactcaatactatggtgatgagagaactcgtacaggtttaaatgcagttattgaatttcagccaagcgatgagttgaacattacattcgatggtttatatgcaacattcgatgttgatgagacagcactgcaactgcctgctcgtttccaattccgtggcccacaagatccaagtcaatgggtagctgccgatattaatgatccaaacggtcgtggtgtaggtggtattttcccattcttagttactgaagctgttgttgaaaacgataatcttgtttatgccgttgcaccacaaacacaattccgaagtgtatcagaattaactaaacttgaatcagatactctagcacttggtacacacgtgaactgggcaccaaatgaagattgggtacttgattttgatatcggctattcaaaaggcgagcaaacacgtgatcttaagagcgtactactacaagcctttgcagacgtagtatatgacgcacgtaatccagataatggtattcctgatttatatgttacaggcactgatctgaatgatcctgacaactaccgtgttgcatttggtaattcaaatgcccgtgatgtaaaagatacgtctttatcattcgcttttgatgccaaatacttcttagacaatgactatttcacaagtcttgaagctggtgtacgttacacacaacgtgcaaaagagatcaaagcatatgtaggtaatagctttactggtgcaaatggtgttcctgcggtactaccaacatctgcaatcaacttacttgacttccctgttgacgatttcttaggtgaagcgccagatgcaaatgtaatacgtagctttgttattggtgacccaactgatttccacaacaagtatggtgttgaaagacagtttgatagcatcagctcattcaaagttgaagaagacattgccgcggcttacatcaaagcaaacatggcctttgacgttgcagacattccagtaaaaggtaatgttggtgtacgtgcagtcaaaactgatgtagaagcaacgggtgcactacctgtagaaatcatcatccgcagtgccggtgactacgatgttgttggtgaaacaagctcaacgagcagtaattacacaaatgtcttacctagtttaagcttaaatgctgaattaactgacgaagtgtacttacgctttggtgcaagtaaaactgtaacacgcccaacgctttcacagctttcaccgcgttttacatttagtactacaactttaacaggttctgctggtaacccggcccttgaaccgtttgaatctgattcattcgatttatcacttgagtggtacttcaacgacacaggtcttctaagtggtgcattattccaaaaagagatcgatggtttcgtatttaattcaagtgcgccagaaacaatcgctggaattgattgggcatctgtagaccgtccacgaaatgcggcttctgcaactatctctggtgctgagttaagtttccaaacaacgtttgatttcttacctgctccatttgatggtttaggcatgttagcaaactacacttatacagacagtgacactaactttggtgatggctttgaaggtcaaacattcagctacacaggtctatctaagaatgtatataacttagttggttactatgaaaaaggtccagcatcagttcgtttatcttacaactatcgtgagaaatacttacttgagccatcatttggtttcttcgcaggccctcgtcatgtaaacgactaccaacagcttgatttaagctcgtcatataaaatcaatgacaattactcattgacattcaatgtgacaaacttaaccaatgagcgcttcgatcgttactttaataacgatgagtcaatcattgcgacaaccaactttacaggtcgccaatactacgtaggtattcgcggtaccttctaactcattatgttgttgtaggtgatatacctaagccaaagcctcctaacggaggctttttttgtgaactatttatctttcgtgatgccaatatttaacagcagacataaaaatgctgcaccacgttaattgatacagcataaataaactacttttacttatagcttaagtttacgtctaaacgcgaccatggctaacagcaaagatattaagtagtacacgctaccaccagaacctgaatcagaacttgagttgtcagctttgccaactacgttaatcacgacagttttagcctctgaagaagcaaatctgtcttttgctcggtaactaaagttaacagcataagtcgactcacccgcaggctcgtagacaaacaagccagtgtccttatcaaaactaagctcgccagaacttgggcttgttactagctcaaattctaactcatcactgtcttcatcattgccaataaaacgaccattaactaccgttgagtaataagtttcataacttaaatctgtagctgttggtgtggtatttgttaattcaacaacaacattggcaagtgccgtctcttcaagggaatcttgcgcggtaaaagtaattgaaacaggctgtaaagattcaccactcggcgtgtatttaatttcacccatgttttgatcaagtaactcaatatgaccatgttgaggctcattttttacagtgaaaataagttgctcatcatctgcatcagaggctggcaaattaagtatcaagggtgtattccagtgtgttttaatcgtagagttttcaacgaccggcgcctgatttgttaaagtagctgtgaactttgcgagctcagaacgtgaacgaccttttactgtataaaacgctaattcatcaacacctacagtgccgttaggcgtatatgtgaactgccctgttttgcggtcaataaacgttaattggccaaggctagggctattttcaaacactacaaaatcaatatcactcaaattaagattaacgtcgattgctgcaagcacatgagatgttacctcgctatcttgcggtgtagctaaaggtgctgcggcttcattcgagaacacctctatagattttcctgaaagcagtgaatagtccacacctttgtatgttgcactcacaatagaactgcgttgatttgcacgcgctacttcataaagcagttcatcattaattaagtcgtactctccaaacttatcttcacaactaaataagatgaagcctgcgcgtgtagatactatattgtttaatgaattgtcacatagttgcgcaacttctgacatttctcctgattctttgaacgagaataaaaggccatactggttggcaacataaagcgcttttttaccatcaacaacaacaccctctagcgacttaaaactgtcgtttaaagagtaattagtgacactattatcagtgtaattatatttaactaattggttagctgttaaagcaaataattctttactgctttgctgtgtatctatgcctgcgactatgccagaaaccccaccccaaaagttctgtaagcgaggtgattgcttaagtagctcacccgtttgcccattaaaaactcgtatataagagccttcactgccggtgtgtgatgcgccgttacctacaatcagctctaacagaccatcgttattgatgtcatgggcttcaatcgttgaaatttggtcgccactttgaaaaggaactgtatacaataagtttccattttctggtgaaaatacttgtatatttccagtgtaagtttctgagccagcaacaattaaatagtttttgccatcattgaataaatcagcagtaatcacatactggtagtcattccagccatcggtcaaagcaatgctaggtaacacctgctcttttgtttctatatcaataacttgaagcttatttgtgccattctcagaaaaaataacatcaattccacctttaccgtcaatatcagcaagtcctagcaaaaattgtgaatagacagtgatcgtttgcgaccattgcatagacttatcttcaacggtatgaatataaaacccgtcatcacctgaagatgtgtaacccgctccccatgcaatatctgttttgccgtcaagattaaaatcatccaccaaaatacttgaaacactgtgttcagggttattgatttgccaaaactcctcgccagaacttaaagtcaaagcatgaatttgcccccactgaccatcgccatatactagctcttgggcaccgtcattattgatatctgcaactataatttttgaaatatctaaatcactattggctgtccacacaatactgtctgtatttggactgattaactcaattgaataccagccttggccattaatgacttcatctaagccatcttggtttgtatcaacactttgtaaatggatacctgttagttggctgttcagtgtttttatataatctattgtattttcagagatacgatacaacttgccatcttcaagcattaattcgtgaacattttgctcggtaaacgaaccaacaacaaatttgttaccgtaatactcaagctctgaaataacagaaaggtctgactggtctagtattaaaatctggctattggcaatagcaataagctcgtcctgaccatcgttattaatatctcttgccgtaactgattggctagaaactacattcttagtactttcgactttcattgttagtaagttaatttttactatctgactgctcgtcataagtattaaataatatgtatcatctgcaatgctttttaccaatgtactatcaatgatgtaatcctgagaatcgaaaccttcaacgactgaatattgattatctttatactcaataatattaaaatcgttttgttgcaccgaaataatttgcttattaccgttaccgaacaagtcaacagcataaagaccattgagacctgttgaattacttaatgaaaaacggcgaaacaccgaggtaagctctatgttttctaattctgatgtagttgatgtcgctaaggttttactcaacgaagtagtcggcgctatattttgttgtgcgcgacttgtaaaataagattcgtcataattaattggttgcgaatttgaataagtcgcatcgccaaattgattatattcaggtgtgcttttagtcgcactgatagcttgcgtgctaagtaaaagcatcgctagacatgttagtttggtcatttccctatccttaaggtagtgctttagctctcgattaaacaatagctggaggtgagttcactttagatgttggtattaagttatatttttaatttaaaaaccgtgcattttcccttatcagaaacacatggtcaaggtaattgtatccttcatgttaaaattgctaaaaaatacaacacaattcttgcttcacttagcgaacgtattccctcatcaaccaatacaaaaccccgttattttcgctcctcgcctcgtacttttacattgaaattaattgctttgaaattaataacctcacggtcaaccctttgttatgttccccgcatcatcaaacacataaatagcattattaaaaactgccacagcaagctgctttaggtagtactgaagttaaaggcactgcttctgtgaatatgcagtttttaggagcaaagactcaatgcgctctggcatctagactattttgccattgcccactttgcttattgcttgggctttagacattaaaaaaggcgtaacagttaatcactattacgccctttcatattaagttttaactaactcaaagtgctaatgctaagattgatttcaccttttctaaatcaatatcaccatgctcacctaatttcgttagctcgtttttctctaaattagcaacaacggcctcaatagcttgctcgtcaaggtcataatcagctagacgtgttttcaccgtcatggcctcaaagaagtcctgtacagctttaatcgttttatcgatttgctcagcttcgtcgctataatttagtccgaacactctttcaccaagctgctgaatcttaattgatttctgctctttttgaacatgcattaaggcaggtagaacaatcgccaaggtttgcgcatgatcaagattataaagtgccgttaattcatggccaatcatatgtgtagaccaatcttgcggtacaccttgacctattaaaccattcagtgccatcgtagccgaccacatcacattagctctaacatcgtaattttgtggctcgctcagcgcctttggcccttcgctaatcaaggtttgcaaaataccttctgcaaaacggtcttgtaatggtgcattaacagggtacgttaagtattgctcaataacgtgaacaaacgcatcaaccacaccattacttacctgacgtgcaggcaacgaaaacgtgtattcaggatcaagtacagcaaaaacaggttgtactgttggtgacgaaaaagcgcgcttttgtgacgtctcttttttagttaccactgagttaccattactctcagagcctgttgctggtaaggttaataccgcaccgattggtaaaggattgctaaactctacccctttaacaaggatattccacggctccccagcatagttataggctgcagcaacaaacttagcgccatcaataacactgccaccaccaacagctaaaataaagttaacatggtgctcttttgccgttgtaaccgcttgcatcagtgtttcgtaagttgggtttggctcaacgccaccaaactctataacgtcaacatcggctagtgcactcatagcttggtcgtatacgccgtttttctttattgagccaccaccgtagagtaacaacacctttgcatcggttggtaagcgtgatgaaatttcgctaatttgacctttaccaaataaaatttctgtttgatttttataaataaagtttagcatcgatttgcctcctaaatttttgataggtaatacttttacaaatttactttgctaacatttttaatagtttttcagctaacaacgtatctgaaaatgggttttgccccgtaatgagttcgcggtcaacaaccacgttaggctgccactcgctggcaaatgccatatttccaccagcgttttccattgccatagccggatagaacttaagctttttaccttctaaactgctttcaaacactcgctcttctggatcagaaaatattgtcattttatagccatcataaatccaattgcttgctgacgccgtctgcccagtttggattgcactgtaatacgccttaggctcagtttgtgccgataataaggtaattgggccgtggcaaattgccgccgtaggtttaccgtgttgattaaagtggcgcaaaatttcaccgacttcaggattatttgctaaatcaatcaacggagcatgaccaccagggataaacactgcatcatattggctcaaaccgcctgccaaaatctcactcaaactagcggtatcattaatattgggtaacgatgcaataaatttttggatctctctcattttttgctcatcaccagcaaagtaatctacgctgattgattttttatcaacctgcggagcattcccctttggcgttgctaacacaagctcatagcccgcatctgcgagagcttttgcaggtacaccaaactcgttaaggtaataacctgtctcaatgctgtgcccaccagcaagttccatggttgtctcgcttgataaaatgactaatacctcgccttcacttgccacagcaaataatgacatagtcgaagctgctacgaatgttaaacactgcaaaaccttgttcatgatttatcctcttatttgaatgcatctagaataggctgtttgcccgcttgtgtgaattcggataaattaagggaagcaatcagaaaatttatggctcgcctattttatgtcttacctcacacagctaaaaacctttgtggaagtttatcgctgcaaaaatataactaaagcagcagctaacctcggtttgtcgcaaccttcggtttcggcccatattcaagccatggagtcagtcgttggtaaagcgttgtttgaacgcaaagctcgcggagttactccgaccgccgctgcgcacgatttagcactgcaagtgtctggtcacattgatattttagagcaaaaaattatgtcaatccgcgcccgctcaagtgccgtatatggcactgtaaatatcgctgggcctgccgaatatattagtagtgtgtcagggccacaaatcgccaacttattgcaatctggcaatgtaaaccttgttctgcatattggtaataaggtgagtatttttgatgccttgcaatctggtgcagcagatatcgctattgccgcctccgaacccgatccttcactttttgatagcttagtgcttgataaagaaaagcttattttagtaatgaaccgccttcacggacgagaaattaaagatagcactattaccgcagatttactctctagctacaatgttgtcgcttatgatgaagagctgcctctaattaggcaatactttgaagctgtattcaacgcaaaatgccactcaaacgtgatagctatttgccctgacattcgtgcaattagcaatattattcgctcaggtattggctactctgtgttgcctgattacctatgccgcgatcagataaaagctggagagcttgtacaactgggccctgtaggcccagaaaacataatttacttagtatggaacaaaggcgcgttaaagcatcctcgcattgcatttgccaaagatgttatttcagcctttgcgaatattaattactttgcaaactaagcaaagcttgatttgactctaatagctttactcgcggggcaagggcatttaaagcgattaagtgaagcatttcagtaacggttgtacacgcatccgttaagacttccacgtcgtattcttttgcttgctcagatatcgccgtatgagtcacacagttttgagtcatcatacctgcgatcaaaagttttttaataccgtgctgctttaaaatatcatcgagatttgtttgataaaaactatctgcatagtgttttacaacaacaggggcttctggtgctgcttttaaaatatcaggatgaatattgacccctatcgtatcttggttaaaaaaaggagccaagccttgtcgtgattcagcaatatgttgaatatggataggtaaaatgccacattctgttgcttgttttattacctcaacaagctgatcttttacttgtttagcccgccatagaggaaatgcaccacctgcaaaataatcattctgtaaatcgataatcaataaagctgtatttgtcattgtgagaaccttttggaattgtgttgtggcacagtttgcttaatttttaacgcagcaaacagtgacccaaacaccatttatcgataatattgggccaaagtatctgataaggttttaccttgaacgttgcagtattagcatttccaaatatcagcccatttcatcttgcagtaccatgcatggtgtttggtgaggctgctcgctcggcaggcatcaaagaatttaacttagcagtgtgcagcgaaagtaaagctgtaatgccttcaagctcggggtttgatattcaagcgcgtcattcaatttcaaagtttgatcaggcagatattataattattccgtcttggccattccctgaaacaattccctctaaagaattaacaaccagcttgctaactgcacataagcgtggcgctattattgtaggactttgcttaggagcttatgcgttagcgcacattgggcttttagataatattgaagcaaccactcattgggcctatagcaatgacttcaaagcacgttttcctaaagtgaagcttaacaatcaagtgctttaccttaaacataaccagctttatacatcggcaggaaccgcagcagccattgattgctgtttacacttagtacgtcagtacttaggtagtaagcacagcaatgccatagcaagggtaatggtaacagctccctatcgaacaggcgggcaatcgcagttcgtcgctttaccagtaccaaacaatgttgcagacgagcgcttagcgtcattacttgaacaaatacaaaaaaatctctgtgccacacacacaatagatgaacttgcaaaacaaatgcatatgagccgacgaaccttcacccgccattttcagtctcttacagggcaaagcctaggacaatggcttttgaatcagcgtttaaactatgcacagcatttactagaagcaaccgatttatcattagagcacttgtcagaaaaatgtggttttggctctgctgttactttaaggcatcactttcgcaagcaatttggcttatcacctagagattggcgtaatgcatttcgccaagcttgatagaagataacttatttaattattaatgattttgactaccctaaaagggtatttaaaagcgctcaaatgtattcaagcgattacctacatatggtaaataaacttagctctatagacatataaaaccgcgcaaaaaaatgcgcggctttataattatgtgcaccaacacaaccgctaacagacactaatcaaatgtaacgattacttcatttgagcatacatctgccgattgacaaacctgataagagtacgagctttctgttgctctacgttcaaaatctaggtatttgcccgtattttctgtagtactgatcagctcgccattacgataaatgttaacgctatcggcactacttccttcccaaccaagctgcacacgcatgtagccaaggcgtgttttattggcgcgcactaattcaagttcaattacatcagagctcactgacagttgttgggttacagtatcggtatatccttcactatcggtcactgttaaggctacagagtaagttcctgattctgcataagtataagttgggctagcatcagagcttgttgcgccatcaccaaagtcccacatccaactgacaatatcaccatttacatcagtactcgcatctgaaaactgaacatttaagccatctgcagtaaatgtaaatccagcttgtggtggttgaggagagacttctccaatcccagttaagtttaatgaccaagcattgagagtacctgtatcagagctggcattatcagacacaaagagagtccagtcacctgtggcaacttcaccattgaaagccgccgaattataggtttcattgatgtcatcagcactaccacccgacctattatgtaaggttaccatcgtacctgatggagatgttaatgtaacaattaaatcgccaatccaagtatgtgttatatctacaaaggtatttgtatcaaaaacggtgatgtcatcattaatggtaatagtggatgtaataccctgtgagttagtatcaggaatagccatcggggtgtcattttgatagctaaactcggttaaaccttgcggcaatacatataatccgacaacttcttgttgctccaaatcacccgatacagcgtttatagctacactgtaatctccccaagtggtttgttcagttgtaggaacggttaaagtaacagactcgccgggctgagctgtatttgatgataacacagcaccgctaatagggctgtctaccgataattcaaccacaccttgccattgtgcaatggagccaatactcaactcgtagcttgcattctcacctgctacaatttcttgattccgtggtgcaacagacaatctaaaactaggctcaggatctgcatcgagtagtgcctgatgaacatttaaacgggtgccagcaactgtcaacccagctaaatttgcattagcatcaccgctactcattagtaactgttttaattctagcgcagttaaattaggattaattgatagcacgagtgctgcagccccagcaacatgtggtgtagccattgaagtaccagaataagaagcataaccgcccccaggtactgttgataaaattgcactacctggcgctcccatatcaacgcttgttaagccccactgcgagtcccaggccatttcatctgtatgtgttgtatttgccactgccaaaattgaatcatgttcataactagatgggtaatgagggtttacatcattgtcgacgccatcgttacctgccgctgcgacaaataaaatatctgcattttcactggctgtaatagaatcagctaaggcttggctatagccacctcctccccaactattattcgttaccctaatattatgaccggcatttttaagggctacaaaatagtcaacacactcaattgcatctgacgtagaacccgttcccgctgagctcaaaaacttacaacctgcgatagatacttcatgatttacacccacaactccttgcgtattattaccagaagcacctaacgtacctgatacatgcgatccgtgcccctgatcatccataggatcaccatttcctgtaatcgcatttatgccataaacatcatcaatgtagccattaccatcattatcgataccatccccagctatctcgccagggtttacccacatatttgcttgtaagtcaggatgattataatctacaccagtatcaataaccccaacgattatctcacttgaacctgtggttatgtcccatgcttcaactgcatcgatatcagcatcagcaactccccctgtttgcccagtgttattcatcccccaaagttcagcaaaacgagtatcatcaggaatacctaatacccgtaactgataatcaggctctgcatattctactgctggatgcttagataaggcttctaatgcaactttttggtttacttctgaaagcttaaagtttgctaaccgaccacctaaaatgtgtttgtaacggtcatcgataccatctgaatttaagtctcttatttttgctttaactaaagaacgtgcttgtgctcgaactgctgcaggcgttccttttttaaatactaccaatatgctattttcatccacactttttgtcggtttattaggctgagtgcttgcatgtgcaccaaccgtaaggagtggaataatagccagtgttaaagctgataattttgttttcatagtgctattccataaacagacgctgtgaaaacacagcgtagagtatttcttctctgaaacaccgatacacaatcttgtggcaacaaaacctttttagtgactgtttaaaaaatacgcaaacctaaacaaagagaacttaaaattttcattcttttttgtgatctaaaatgaaattaaatctagagtttcaagcttttttgttagctttaacctgccgaaactcatgccatctttctcattctttttttgtactagatccaattttcataaaggtcccaagcaaaagtaagcctaagcaattgacttaaatagattaaaaaaatcacaaaaacattccatttatcacttcgtaaagtaaacataaagttaatactctcggttgcgaaattatcttctttcattcgctacaagcgaaacgacgttttgaagtagccattttcacagccgtttttgggcttctctgtattcgatatacaaacaaaggttcttttttctatacgaatgatgccatacgcaatcacggaagttttggtgtttcaccaccaagtaaatagcacaaacattttggattcgcgcacacctgttaagtagcaaaaatacaagccggcaaccttgtaaaaacgctttgtgtatcgcggctaaaaatattttattgattaaggagattagcgtgaaactatctaaatcgattttaacctgcgcaatagcaatggctttatcttctgctgcgtatgctcaaaatacagataaaccaagttcaacatctgcgttgacaaatgtagagcgtgttactgcacaagggaacctgctcgtcatttctcaaacgtctatccaaggcttaggaaatgcagcaagtacattacaacaaggtaattcaaatcaagttgagataattacaacgggtgatggcaatgagaccgatgccgttcaaatgggcaatgggaatcttattcttgtaacaacttacggtgataacaaccaacagtcttatacgcaagatggtgagcaaaatggagctctaactgaagtaataggtgatagcaaccagctttcagtagttcaaaatggtgcaagtttttttggtattacaaatgaagtaatcaatatcataaatggcgatgaaaatgacattactgtaacacaagatggcgatggaaattggttttataactacaacatgcaaggcagtgctaatgaagtaactgctgagcagtatggtatttggcatgaagcaaaactatatgccatctatggtgatgaaaataccatagaaatagaacaagacggtttttggaaccagctcactgttaacaacatcactggcaacatgaatgaacttaccagtgagcaaattggctcttacaatgaaattagtatcactgaactctatggtgatgaaaatgaaatcagtattgaacaaaatggtgatgaaaaccaagtaagcattgattcaatcaacggcaatgaaaacaatattgaagttgagcaaagaggaaataacaacgaattcaattctggtgtgttcacaggtaatgataatgaagttgatagtattcaatatggtgatgacaacatagcaaccgcagagttaattggtgacgaaaatgacatgttgtctgttcaaaatggcaataacaataccacttactttggggttatcggcaataataacgaatttatatcacttcaagtaggaagcgataatattgctcatgccgttaactttaatggttcaaataatgacattgaaatggtgcaaacaggggatctaaataccgcaataattgagtcatcttatccaaataacagcattgctagtaatgcgaatgaaattgttatatcacaaaatggctatgctaacgaagctacccttagcttgagctctgttatggaaagctcgaataaccaagttgatttagctcaaaatggagagcttaacgcaattgatcttatgattgagggtcttggtaatagtattgatattgcgcaagaaggtaactttaacttagttgcaggtattagtgagggtgcttttattgtttcaggagacgaaaactctgtttcaatcagccaagtaggtgaaggtaacctagttgaagggtctatcatgggaagtggtaacgttatatcagttactcagattggtgacttcaattcagcaactgtcattcaacagtaatagagtgtaaggaggggccctcccctccttagatgcgattatgaaaaatatcaactacttaactttaaccattattttgcttttttcagtattccaacactgtgatgctaatgaagtagaaattgacggtttagtgcttgatcgtagcatcagtcgctttggtcatcagttttactatggcttttcgcaattgtggctagacctacctaacagctctgataatcatgttgtaattaaagaaaccgtacttcctcgcgccggaactcgacttgaagttttacttaataacgaactaatttacgtcacttttatgggacgtagaggcggccctctaaaagaaagagtagaaagcgcaatgtttgcggcaatggatgcaattgcgcgtgcacgctttaaacaaacatctccagatttagcacccagtggatggtaataacaatgaaaaaaataattttcgcgaccttatttttaacctccccattaatgctcgctactgagctagtttacaagcccattaatccatcgtttggcggcaatccattaaacgcaaacatgcttttatctaaggctcaggctcaaaataaacacaaagcatctattgatgagaaaagctacgcagaaaattttcaggattctttagagcgaacttatctaaacagaatggtgcgtgaaatcactgatatcgcttttggtgatgatgtcgaagagagtatctttaaccaagactctacctttgttagtggtgactatgagattcaaataatcaccagttcatctgatgctatcacggtgcaaatcaccaacttaattgatggcactatcacaattattgaagtgccgaggttcggataatgatacgcatactaacattactactctctttagtatttttgaatgcttgttcaacattcaaagcaacactgcctccggcacaacaaattgctacagaaataacactaacagacacctttgctgaactaaaagcattgccaaaaccaaaaggagccattcctgtttctgtttattcatttcgagatcaaacaggtcagtataaacctcaagaaaatgtaagctccttctcaacggctgtcactcaaggcgctaactctattcttatgcaagcgttacatgaaactgactggtttattcctgttgaacgtgaaggactacaaaatctactcaccgaacgtaaaattattcgcgcagctatgaccgacaacgaaaatttaacacctgaattaccaccactaacaactgcaaaaataattttagagggaggtattatcagttacgacacaaatatcaaaacaggtggcttaggcgctgagtattttggaattggtgcatcagaaatttatcgtgaagatattatttctatttacatgcgcgcagttgatgtgcgaactggtcaagtgctgctgtcagtggctacaagcaagaaagttctctctaaagaaatgcgagcaggttttttccgctacatcagttacaagcgcttgcttgaggctgaagcaggatacagtgataacgaacctatgcatatttgcgtctctcaagctattgaaaaagcattaactttgctcataaataaaggaataaacaagggtctttggtcacctcagattatttagtaacaactcttgctcacctagttacaatggatgcagcgggcataaagcgctgcgcccaatttgccaattcgatacgattacgtgacttcgttttgcgaaatgcgctgtagatatgtgttttaactgtgtggcaactaatattcaaggtgtttgcaatatcctcattttttgctccctttgccagcaaagagatcactgacttttcgcgagcagttaacacatttaaacttaccaaatcggtctgcggtgtttttacaaaattgggcacttgctgaacgagttctgataaagttttagacattgtttttcgacaaaaccaaagctcaccagacaaaatccgtctcactcctttaaaggtattttcaggctcatcatttttataaataatgccttttatatttgccaataatgctgtttgttcgtgtactttagtcggcatggcattgtataaagcaacatgattacttttcgccaaatcgataatttcttcgtttaacaattctgaacaactgctataagccgcatcaactaaaaataatgcaaaattagcacgactgtcgatagcaggtaatcggctatcaaccttaacctttggggtgacagtctctaacactttaagtaacaacaaaaaatcatcgttgtataaatctgtgtgatatttagtaagtacaaataaagatttactgatcattacttcatcctttgaagtacccagaagagggataaaaatagtgtacctatttttcttaattgagcaagaatctctgagagaaaacaagattttcaataacattacattaactttaaaaagttttaataagaaaaataaactagtcgcaaatcaaaacttttagcaatgagtgagcttatgtatacttccagcttctgaaaaatgaccttacaaagggttaataatgaaaaagctttctaaagtacaattaaaacaacaagcccttgtattaaatgttgccgatgctcttgaagagcaaggccgcgctgagcttgaaggcatgttgcaatgctggttcgatgtggaataccacttatttccaggctcattgcttttatgttttcaatttgaaaatcaacaaactcttgatgctgccacaccagaattattaaagtggcaaaagcgcctgagtggcgcaatgctgaaaaagggcgtgattttaaaagacatgcgcaggcatttagtatttaccctaaaagggccagacgattaagcagcaactgctgcaataatcgtaggcctaagctctgttgtaaataactgacgtttagttaaaatttataatttaagctcaacttgtaatttaccggctcccctggctgagtccaaatagcagagtacgaattagaataatattttttatccagcaaattatttacattaaattgcaagcttaagtcattagtcacattgtattttgcaaacatatttaccaaagtgtaagaaggtaagtaataggtaggatcaatggtttctccaagcctctcgccaacatattgtacagcaagcccaacagttgcatctaaatctattaagtcgtttagctctctcttaatttgagcatttgcactgtgtttagggatattaagtaacggactgccttttggcagctttacccaccaatctgggttgactgtatcgtttgctgttttagcgtctgtgtaagtataagcaaaatcaaataatacattgcttgtaatgttgccatgtaaatctagctcaatgccatcacttgttacttcacctagcgcagtagatacaccagcttgtaggtctgtagttagcatattgctcttttcggcactaaatactgtaaaacttccacttacactatcggtagtaaacttaatacccgcttcgaaagatgctgtttcttcaggctcaaatgcatctcctttactatcgtaaccgctgttaggtctgaagccttcagagtaacttgtgtagtattggaggctgtctgagtagacataaactagaccgacacgcgggctaaatgtgctttgatcacttttagactgttgctgattaatatgattatctatttgttgatcaaaccaatcaaaacgaccacctacttgaactttccactgctcagttaggtctagttgatcttgaatatacactccataactatgttgtacttcagtactgttgaataaaagagacccttcaggcgctgcttttccatacactggattatacatgttaattgcgtaacgggtgtcttcaagtgttggacgatatcgataccacagtttatcaaaatcgaacttgctggcatctgctccgattaataagtgatgtgtcaaacctgcaagctcaacactaccgctaagttctattcgcgctgaaaggtactcagtttgaaagtcgcgctgattatgctgcctacttaatgtttcgccatctttgaaataaatttgtctacttggagcaagttcggcatcactcgactcacttaaaaattttgagtcactgtaactaaaaccattcaaaagagaccactgtccaatttgcttctcaaacataagttgatgagaaatagcgtcaacttctgtaggtttatcacttggttcacctaaaaaagtgtcaattggtaacgcatctatttttccctcaatggcgacaatgccacgatcgaaggttgtactttgatctacatactcaagctcataattcaactttgatgtatctgaaattaaccataaaattgaaggcgtaacgaccgttttgcttgactcatgatgatctcgaaaactttcaccctcttcaacagcaccattaactctaaaagcaacattgtctgaaacagcattggtgtagtcagcctctgcgcggtaattctgccaactccctgctgttacttttatataaccctgctttgcaaactgtggttttttagtgattatattaattgttccccctggctcagaacgaccataaagcgcagagccaggtcctttcatcacttctacgtattcgatattacttgtatcacgtgtaccactgaagcttctgccagatgagtagccgttaattaagaaacctgatggaatactctcatcgccaactaacccgcgtattgcaaagctttcccacaaaccaccaaaatcattttgctcagcaatacttggagttagatcaaaaatatcggtcaaagtgttcactgccgcatcatcgaggttttcagcagaaataaattcaacactctgtggttgctcactcataggaacatcaccacgaaacgcttgcctaacacctgaaactgatattttttctatgttcggtgatgctgttttggcataaacagctggagtcaaaattgtgctaatagcaattgaaagtacagaacagtggaatcggttaattatagtcattttatctcttgggtataaatacagcttaatcggttaagtctttaaaggcgataagtaatggtaataattatcatttatattataataactaaatgtaacccaaagtgctaccttaattaaagctgaaatgtctttgtacgattagtgagaaaacatacaggttagaagagatactctaagtcgattaaacaggtgttttaagaaaagttactaacgcatttttctatgctttgaatgtgttaactttgattgttcaaaatttggaggcaatacatttttcttgtgagataagttatagcccatggtgataaacctaaccagaaacaaacttttattaataatcactaaaaaccaaagaatgcaccgaggcaaatagcaacagattgtttaccataattaatctgtacgctatatgtactcggtgattgaagtaattaaagtgaaataacttttacgattaagcgttacagtttacacactgccaacgcccgcgtacttaacaccagataacaacgccatatctttgtgccacgttgctaggtcattagcattaaacttagctaaagagtcatgcccacatgccctagccattaccgacattaactcagttgaggcttcaaaaaagttctttaattgatttgccgacttttcaatatttaagcgctgacgtaagtcttgcttttgtgtggcaatccctgctgggcagttattggtattacacatacgcgcagcaacacagccgattgcttgcattgcactatttgaaatcgccaccccatcagcaccaagagcgagcgcttttacaaaatcaatgggtaaacgtaaaccacctgtaatgatcaacgtaacatcacttgcaccttgttcgtctaagtactttcttgctctggcaagtgcaggaatagtcggtacactaatatgatccctaaagatctcaggagctgcaccagtaccaccaccacgaccatcaagaatgatgtaatcggcactcgcatcgagcgcaaattgaatatcttcctcaatatgattagcacttaatttaaacccgattgggataccgccagttacctcgcgaactctatcagcaaattttttgaaatcagccgcactgtgtaagtctttaaatgttgggggtgaaatcgccgaagtacccgcttcaatccctctaacctcagagattttgccaacattcttattgcccggtaaatgcccccccgtgcctgtttttgcgccttgtccgcccttaaaatgaaaggcctgcacgttttttaatttatcttcgctataaccaaaacccgcgcttgctaactcataaaaatagcgtgaattggcttgctgctcttcaggaagcataccgccttcacccgagcaaatacccgttccggcaagctctgctccttttgctaacgatactttagcttcttcagataaagcaccaaaactcatatctgaaacaaaaagcggaatagccagctttaatggctttttcgctcgcggaccaatcacaagttcggtattaacggctacatcttccattaacggttgcgttgccatttgtgccaccattagttgtaaatcatcccacttaggtaattgatatcgcggcacacccatcgacaccatagggccatgatgaccaagctttgataacccttcacgtgctagttgatgaataagctcaacggtgggctcctctttggttgcagtagcaactggcaaatcagaggcttgaatttgtacgcctggcccttcttgaccaacttggcttttatcaaattgtttgtgactgccatcacaaaacggcgcattggcagtgtgcttacattggcataaataggcatcgcccgactcttctgctgtaaatgctttgggtttgaaatcggttccggcatgtgagccgtcacaaaatggctggtttttagaacgcccacaggcacaaaagtaatactcttgcccctgctctaaggtgacttttttcggcgaaacggctgcaattatgggtttgctcattattattccctcacggttgctacattacattgctatgttcaagttactgggattgaggtaagtattaatttaaggcttacttgctttacaaagggtagttcagctcagttaaataacgagcttttaagcgccttggagtttacttagctatcgataaccgactatataaccgcaacaagcagccaagatatcagccatttcatattttaaggtaagaggtaaattggtttatgagccgcagtgtgggtaattttcacatagaggataagaggcgctgcgctttagaggaaagaactaaatactcttttggtttatctcattcacttctcattctcttctctctgtgcaaaaaaacaaattgaaccacagagttcaccgagccgcttcgcgctacacagagaaaaacagcatttaaaaataatagtcacaaagaggataagaagtgctgcgctttagaggaaaaataaaatactcttttggtttatctcattcacttctctttgtgcatcaaaaataaattgaaccatagagttcaccgaggcgcttcgcgctacacagagataaaccgtaaattacgcggggtaaacccgctgctaccggttcaattgttgggtttcactccgttctacccgacctaccagcaaatagctcctttcccgtttactctagaaactcgccaaatcattccatcccctttagcttcacatgctcaaccagctcggggaaaaacgctaaaaacaccgcgtctaattgctgataatgacgagcaatatcgtcagccgctcctgcaaagttgttagcaaaacgaatacgcttggcgatgttatcaagggcaaggccgactccatcgagtgtttcatattctttaaaccaatcattattagtcatactggtcacaacttgctgcatgcgtgaaggcataatggcttggcgcgcatttaaaagcccatagctgtgctgtttgaattcagctaatggctgatcattaaagcgatgccaatggtgaataagaaagtgatcaaacgccacatcaatcgcgacacttgcaaagcgtttacgtgctggcgaaaaatactgcttagcctcttttacaaggggatgtgagtcggtaaacctatcaaccaaataatgattttcaaggccatttttaaccgcgtcagttaactgcgctgaataacgacgcccaccaaaatccccaagcagatttccaaagtgtgaatcagccgtcggttgtgctaagtaaaggtgggccaagtagttcaacgcattctctaaattaagtcattttatgcattgtaaaagaatacaggtgaaagggtctaggggcgcgagttagcaaaattttagaagcgattttatatcgcgtaattcactgaataatcacaaagagtgataagagacgctacgctttagaggaaagtaactaatagttttattgggttactcatttacttctcattgtcttctctttgtgcaaaagaatattgaaccacagagtacatcgaggcgcttcgcgctacactgagaaaaacagcatttaaaaaaaatagtcacaaagaggataagagacgctgcgctttagaggaaaaaaatactcttttggtctatctcattcacttttcattctctcctctttgtgcaaaaaacaaattgaaccacagagttcggcgtaaaaacgcctacactcttatctcgcatatctcgcaaactttcccctgtaactcgctaacttgttgggcttcgcttcgctccacccaacatacaataagagctatcctttactccccagcaaactttaacattcgcgtttggtcggtaagttcaatatccaccagctcatatggggctttggctgctttggtgaccgtaaaaggcatggtgaaactatcatagctatcaatctgttttgctacttcaaccgttgctagtttgatgcgctcacctttatcgcctttgccagttaaggttgcacgaatggcgtagcgacctgaatcggtcacttgcaccggcaccttggcttggtatttattattgccaagcgcagttactttggctttatccatactgatggtttgtgagctatgcacaaacggcatttttatagagcgttttaccgtttgaccattcactttagtgtctacgctggcctcaagctcatagtaaccatttattgcacctaaggtttcaagcgggtaattaaatacggcttcaccattttcgtaacgtacatctagcttttcgccatcaggacttgaaagcgttaacttcacatcactatctttaaagcgctttttacccatacttagctgcatagcgacacgttgttgctgatctttcactttaaactgcgatttagcatgtaaagcattgctcgagcctttttcgatcacatgcagcaagtaggtgtcgttgtcgttaagcgcttggcttgttcttaacattgctttgccatttacctgaccaagctttaatccaacgctgccatcgctaaaccctgcattttccatttgttcttgtgcaaccatagtttgcattggcatttgtctaaagttgtcatcacgcaccgacaacttatctagctgtaagccatgaggcttaaatacttcgccgttatcaaaacgtgcttttggcgcaatgcgaataaagttatcagcttggtttacaaatacaggcacgccgcgtttaagctctttacccgaaactttctgccaatactcaacgctgtctttttctagtgtttcaagttgagcgctcaatgctggttgaacttgaggaaactgataaaccgtttgttcattagcctgtgcagcgttgcttacaagaataattgcagcagcgagtgtggttaacttattaatcatagcgggctcctaaattcgatttttaagcatgtctggcaaaccaaagcagttgcgtcggctttgctgatgactcaaaggttcacggcctttagttcgtgatttatcggtaaaccacaccaccccagctaacgactgagaactgcaatttaagaagccatctgaacagctgtctaaccagttttgtgttacttcaaggcccacttgattttgataaccaccgcaatagctgtcgctatcccataccgctgattcaacatcactgccgaccacggtctcgaatcgagacggtaaacttgggcggtttggtgtgccatacaaccactgtgcgttatacgacgccatccaagatacctgctgttgctttactgcatcgctgccataacctaacagccaacctaaactttgctcgaacgaattacccgcaataactgcatcagccaacggcgtaccaccacttgaaggagccagagcaatggtacgcgtgactttgctaataatatttggataacggctatcccatgttgggttagataaaatccaacgcactacattaccgccattagaatgggtgatcagagttaaatcagtgatgtttttattattgataaatgtagtgagctgccctgctaaacagccagatgccgcatctgcccacatatactgatcaaaatcacaattaatgaccgtgtaattactactgtttggtaaaccttggcgaaccgtgtcgacaaaactgcctgtccaatagtcattatacgcatcgctttgctggcctgtaccgtgcacaaatgcgactccttgcgcagcaaaagcactgtggctgatacccgctgccaacattaaagctggcactagtgagagtgtttttattttcatgtgtgttcctgttgattgtaattatatctatcaggttggaggagtgacctccgaccaaaaacatagaccaaacaggtacgaaagcaagaataaatttacaataatttaacttttgggtattttttaagtacaaattattagtttttggagaaaaacgtgggagtgaggttctaacgtcatcgtgttggttttgaattgtaaggaatatcggaaaaggcctgaccactttatttaagaactgaattgagaagatcaaatcagactcacccatatttggcttatgttagatttatggaatagcaataaacagtttttatcgcttaaaaaatactgagcacctaaaaaattatctctactctgcatttttgagaatctcctacccctcccaaaagtatagcttggtggctaaagactttctcgccaatacttaaagctgatcaatattacccatgcatagcttaaaaagaacaactgtttacagctaaaagtcagagataaaaaactaaaccatacttacagagtcactttcaccgatacttaaatcgtcgacaatgtcatttcatagtcaaaaacactttagcatccaatgaaagtaatactttttcgtatcaacctttgtttcataatatattctaaggaaccttaataattttaatacttttaatactttttatttttattgagatatgcagatcgaaatatgtaccatcttcagagacggaggataagatgaaatttgaacactcaggaacgagtcaagctcctaagaaaaataaaccacttattttcgattatggatgcctgactatttatggaaaaaaaaacaaagtcagcccagctacatttcgagtttttgaatttctttatcgaaattttggaaaaacagttagtagattagaactactaaggattggttggccagaacagcaagcagtgcttgggaatgttaatgtttcaatttatcaattgcgcatgatcttgaatgataccaactacataattgaaaatataagaggtgtcggtttcaagttaatctatctggaagggaataaaattgaaaataataaataaaaatatagacgaatctattgtgaacttaatactcgctatagactcattgccacggctcaaatttgcgaaaaataaccggttatgtatttctgaactctccagcaaacttctgcttgcaggcctcgataatgcttcacttgaagataaggtaaattttattaagttaagctccatttttcttaatgatgctatacatcataaagaaattgatgaaaaaacattaaataaagaggaaattgattacattatacgtgtatcaaaaaattaaaaatgagtaccattaaaaaaaataaattaagaattttcacacatacttttgttatttctctattgacattaacgctttattgcgtcgacagcaattttttcatttttagcctaacattgttaatttttctcgttgcttttttccttctttcaaaattagaaaaatatagacagggcttatacttttcatcatttatttttgagtcacacattacatcagaatcaattattgaaagaggtttacctttctatatttactattgggataataaaaaaaagccgattcacttaaacttcaaagcactaaaagatactcagaaagcgagctaaaaccaattagtgatttcttaatgactttgttctagttgcttcgcgcgaaataaatttcacgtctacgggtaagcatccctgttcgtttgttgggctttaatctgatagctgaaaactgacggctttatatgacgcacaacctaacataaaacttatgacttaaaggttaaaactcatttactctttatcctagcaactcgctaacttgttgggtttcgcttcgcgaaacccaacctacaagctcctttgttattcagcattaaaaacgcctcctacaactcggcatttttgcgtgaatacattttatgtaagttcagcagtttatctttgaggcgctgagaataggtgacgaaatttgtcagcgtaccggcatcttttcggttggtatcagcaagtagcattaataacttacgctgcgcctgattcagatgcagttgcaataacctagctgctttatctatttcgtcatttttaggttgttctaaattctcgctggtatgggtgaacaaggtcagcgtatcactcgaaagttcgcggatcataatcaaaatatcgctctctaattcaataaattgttcattcataatccgcttgctttcaaacagatcaatgatggaatcatgaatttggaacaaataatcaaaacggttaatttgcagcattaactctcgtgactgctcttcatcattgattttactaacaatagtagtgaaataagtgatgtattccttctcaacaaagctgacatattctaagcgtttttgtgctgtatcttgaatacctttgtagttggtctctaagctcagcgtgacctgattatagttttcttttaagaagttaagcagttgttggttacctgattctaacttatcgacgacatgctgaaactcttcgtcttcttggtaggtgggcaattcaaggcgttcaaagtccatttttccttcaccaagcagaaaatcaacaaagcgcgtaaaagggttaacaaaaacaataaaaactaaactagcaaccacattaaaaataaagtggatgtttgccagtgcgacagcgggatcaagcgtaatttcacttaacttatcaccaaacaataaaatgaaaggcagaaacaaaagcaccccacccacattaaacaacaggtggctcaacgctgctttctttgctgcgatatccataccaaacaccgagatcattgcagttgctgtggtaccaatattcgcccccataataatgggtaccgcgttctcaagccccaaaataccttgctgagtaaaaacaatggcaagccctgtagtcaccgaactcgactgcaccatagcagtaaatacacagcccactaaaatcgctaaaagtgggttttgcggctgcgttaaaatctcaattaatgcagggttgttttgtaatggcgcaagtgatgaagaaataaggttaaggctaaaaaacacaaaaccgaaatagaaaatcgccttaccaaaaatagaaaagcgattgcgagtcagcgacagaaaaaagccaataataatgatcacaggagcaaatacagtcagcttaaaagccaccagctgagccgttatagtagtgcccacatttgaaccaaaaataataccgacactatttttaaacgttaacacacccgcattaaccaggcttatggtgataaccgacgtcgcagaactcgattgaataaaggccgtcaccacagcaccaattagcaccccaaaaataggaatgttagtcgcgcgacttaacgatttacgaaagcgctcccccgatatactttcaatttcccgagaaaagttctcaagcccaaaaataaaaaggataatggcggttagcccagccatggctatattcagattttccattcgcttataaagtgctgatattattaatcaagatcgatacaaaagtatagatttgagtaccttatagcgcaatgatcgaaaacaaagtaactggttttaggggcgagttacgaggaacgagattcgaggcctaggaggcgttttaacgccgaacagaaatggagatattagatatcagtcgttagaactcagattagattgtgcctgcgcatagttaaatcaaaatgctcatccgtaagcgtgaaatttatttcgcgcgataaacataagagctttcagccgtcagctatcagtttaagaacacaagttagctaggtgctaggtgctaggtgctaggtgctaggtgctaggtgctaggtgctaggtgctaggtgctaggtgctaggtgctaacagcatagtgttggtttggattagtaaaggggttaggcaaaaagaaagacctgaccccgttgattatgaaaattgaaacattacgcaaaatagagtaattactccaaggcattaaattcattatgaagaatcatagtttcgtgccgcatataaattagtacaaactacgatccagaaccttaagtctgctgtctaagtcttatttacctaaatacattgtctgaccaaatgattcatcatcgtatgacggcaaccaatctttatcaccatttccagattcgtatttatattcggtagtcgagaaaaccacttgaacattaatttcatcagccaaaactttcaaagcttttataaactgatctaaatcttctgcactaatatcatgctgtcttggagtatcaagaatcaaaaatcttatgccctgagggtttgactttacaatttgttcaaataaagcagcatgataagctaaaacaactcttagtttcgtacttccttttatttgattaagcttttctccaccaaaactagctttgaatccatcatataaatcaatattgtcagaaacatttttagtattaatcacattcttccaatttgatattgaactctttagattagattggaatctgatcaactcaattgaagatttgttaattccagagcttaaagattcctgcttacttatggcattatctctttctctctctgcggccatatacttttcttcgagtacactaatattttctaattcccgctttttaatttctaaggaaacaatctccgatagacttatatgaatcgactctaccagcgcagacatcccatcatcatctacagcatttttcctttctttattgagggtttctatatcatccaagtgtgtttctaattcaactttaattgcctcaattcttttttcggaacttacgctactaatttctaaatcttttatttgatcttttagataaagcagatttttcccgtatgactccgaactaccaagaaacaggccgcacccatcaaccgaacaaatatcagcaaaagatttaaaaacccttctggcctcttcatttagagatagtgtatttatttccacttcaatctcagatcgaatactcgatatactggagcatttactttctaacaaatcaagctcttcctttagcagcctaacttgtgtcattttagaagaaagcaatctgtctatattatccgtagcatcaagctttaaattcttactcgactttaactcttcaattttttccttcaatgaatttagctggttatcaacttcaacaatatttaatttaccactctcactatcatttaaagcatcttcatacaatccttttaagcgttgaactttattatccaatctctcaacagcctttttcgcatcaatggcactttttttcttatcaaaggaattctttgaaggtaggtttacagaaatcctgacagcctcggaaaattgatctcgaatgaaattgctgcccggagatttataaaaatctgtatagccaatatcttgatctaaataaaaaattggtaatattgtggataaataaggatgcgtgtgagtattggagttagtaaccaaatgagggaattcatagccgaatacttcaaataaataacggctgtaatcaccttctttaaaaaatcgttgtttagtacctgttggctccataacttgaacgtaaagttctctcgaatattggcgctttaatttatagattttcccatttaaagatactgttagcacaacactttcacagtgaacataaatatcatctctaaattcgcacgggtagcctaaacaaaaggctattgattgcacaagaggagtttttcctgacccatttggcccgtacaactgagtgatagatttagcaaatgcaagctcacttgatccccatccattgctgccacgagcatacacttttagagattctaacttcatgctaattcaagctccatttgtttttccctacatatatttcgataatttctttgaattaaaagcaggttgtaagacaagtctgatttctcatctatggctttgttaattactttcttgcctaattcagtagcttctaatttagtctttctgttattaaccgaaaccaaattcgctatttccaaaaacgaaagcgcttttaccgttctcactcgtagatttgcagaccagcctaaatgctgagaagaacctttaaactctttaatcgacctttctatgcactctcctaccaattgtcccaattctggagtattaggtttccgtctctcttttgccatcaacaaaacaaccattgaaataaaaggtaagtgaaataaagcttcattacttagcctatgcgacctaacagtctttacttcatcaagttgaattctaaggtttgaagctttggctacctcaaaaaactcttctatatccataatttattgagacctcaccattactgaaaacaatccacctaaaacaatctcttcacttaaagctgtgaagcacttttccttttttaaatcactaaatattctttctacatcttcttttaattcagtaaatccaaaccctgtcactatcctctgttttacagagtccgataacttagattccagcatcattaaattaaagtcaggtacatcgtgcctgtacttcctataccaaatgtcccattcagttttacattttgctgcatagtcaatgagttgcttaggcgtatcagttttctttaaaatccgctgtaatattgaaaggctttttagcgcctttgtgtcaccaccactagttagcatatcgtagccaattttcgataaactcaagacttccagcaattcatcaatgccaaccccagctaattcatccaaggttttttcatctaacgatttcggcaacactcccacagatttactttctaccaaagccatcaagttatcgattatctctcttgcttccatatactgaagatcaatttcgctgtactgaaagattttttctctggcaattgattcgaatatagcgccttctacttttaagtattcgacccccggaacaattccaaactttgagattaaagatttaacttcatgctctttatacaaccgtgttccatcactgaaacaattgttaaaatgctcaacgagagctgctaaggttttatttgtaaaatcttcttcatctaacgcttccagtagatcttcaacttcgtctttgacatgtatgtttgttagaaaaattactttttcacacgaagctgaaaagttaacagtatgaatcaacagtttcccagcaaagctatcagtaattctctcaacgatatcttcaggttttttcttattatttatcccaaaaatatttattagcgaccattgtgcatttctttttttcttagttttaacctgaaaaaagtgataatacgtttttccatcaataatctttctaacaacgaagtcgtcatgccaatcgcaaaagactcgatctacagtattattttctagaatttctaaactggctaaactagcggctctagtttgggctttatacctagataatgtatctctgccgtcctgttctctaggatctacttcatgtaacttaaccaactgtcagcaacctctctttattagagttgctttgcaggaaagatttgtgattggatatgcatcactttctatccatgaaagcttattattaatattttccgtgattaataatgacagttaaaccgactcaaatcgatactgtacattattacagtatttttcccgatatcaagtgtcagtggtcaattattaaaacaacccgctatcatcttcggcagacgggtgagttgcttcaaaacacattgggtcaggccttactttttgacttaaccctatctcctccgcgcgaaataaatttcacgcctacggcatcggggttagccatagcaatgtgcgggcacgtctaactcaaaacttatagcttaaagctcctttactctttcccctcgaagctcgctagcttgagtatttttaatctaacttctaacaacttatatctaataactcttttttcggcgttaagacgcctcctactactcgcatctcgtccctcgcaactcgtattttaatctgacagctgacggctgaaagctgatagctgttttccaacaaaaaagccgttacattgctgtaacggctttttggcatttgaatttaatcatgatcacaacagatctagttggaaactaagcacgtctatttttcaataatttacgaaaaggcttgttacaaacctagttggaaactttgccccttttttgttgccgaaaacttactggtaaagcaatagtagttggaaactaggctacagggctttatatatcggggtttaacctcattaccaaagagaaaataatggttcgagaacacctaattcattaaccaatcacaataatgctttttttcactgtagtatcgtgtttatgttattaataatggaaaaaagcactattaagaaatcgttagctccaacccattgatgacacttaccagcgggaggtttttatcacaaacgttaaaaaaatttgctatcgtctcgtccactaagtatggagaccgttagacgtatgccaacaatcagctaaatcccaaagcgtatcaatttcacgttgaactcgtgctgttctaaagtcaaaaaaagcttctgagaattctacttttttaccttcataaaaatcaggaaaataagtattagaataactaaaacagtttttgtagtgatagagctgaggtaattcttttaaatatcttttaaggttagtttctgcttccctagtgtttttgtagaatagaaactctttatttccctttttactatcaaccagtgtaaaacttccaattccaaaataccgttccaaaattgatggatctacaactggaaagtcgttgactaagattcctacaccgtgaggagaacttgacaaataacaacatagaaccttttcttcatctagaagaaaattggcagttggatcataagtctctttaaacctttgatattcttttataaagaattcttttttcctgcctagtttcgactcttttaatgtttctaaattgtttttaaatcctgaacttccaactctataagtaaatgacttagcctctattattagataggtctcacctattctcaaaactatatcgatttcctcgttgtctttacccttctcttgatcgaatccaatttttagaactttacaaaatatattgcttaatacttcattattatcaatttgcgttgtcagctcgtgtccaaaatccaattcaaaaaacttccctttattttgagttttctgattcgaaacagcaggttcaacctcattatttatataaaaatcaacaactctcgtaaactgccctgttaatagagtaggaacacataaatgaattttaccatctttttcatataatggttttaaatataagtctgacgttttaaggagtgatttctcattggtaaacaaggaaataatttggtctgatttttttaggctaaagtcagtgcaccttaataaaacttcgatgagttcttcttttgaaaatgcataatatactccttgactagcttgagctttcaacgcattcacaaaagttaatgtcaagtttgaaaaaattaaccaaaaaacactcaagtctgagatagagagctcatcatagttcttgaatctaacgtccataaactttttatagtaaaatttaatctggcatatcaagctatgactttgcttatgaacgcttttgttggaagcaataaaatcaatgtacaaaccattcatagttatattcatctttgatggaatagctctaatcctatgatctataaagtcatcacttttatcgaattcaacacttaactgattcatgtgatcttgaaatcttgataaagcaataatttccccaaaatctagctctttgttgcatgttacaaatttatagctattaagtgatttttgaagaatcaatcgtttattttcgattttcttccatttctcttccaagtaaattcttttagaagatagtcgtaataatgattcgtaaacatcatagtttttttgtcccgtaaattcagcgaaggctgacttaagcattaaccaagtgccatcgctaattacttcaaatagctgattcacattatctggtttagggcctatacctttttcaagactgtcaaacaaattaaccgtgaagatcgcttgaaacattaaaagttcaacttcagagagctttccatactctctcaataattgttggaactcctcatcgataaccttcaataaatttccaattatgactcctgactctttgtaatattgatcgtagttttctgcttgtttaagccattttttttcatcaaaaaaataactagttggtgaataccccataatttccctttcaatacttataatttaaattgagttatggtattcagcatcaacagtagcccttacttctagttgataatctgtactgccattaaacagatttatcttcctctgaggatcgtcgccattttcactaatttttaccaatttattcagtaactttttaccgtaaccatttttctttccccacatagacgcatatgagttttcaagcctttccatgtacatgctttcatcttcttcccttctgacgaatgtgaggtcaacaacggaatgaattgctttatcaaatgaactaaataaccaaacagagtcgctgtcttcacaacagtatttaattagaagttgaatgaaagaaatatcccatatagcgttccgaagatctttaggcccatgagatttgagcatttttgaaattttccagctactaaaataaacagataaaaagtgaaatgatggtgctgaaaacatatactcatcatatatccaatccatcagttcaagcatggtttgatatggagatattcgtttagaacgagctagagatatcgctttttttattatgactgcatttctctctaccaaagttaatctctctggtaacttgccacctataagctcgccagtcttaaacaaagacagttcattacgacttatgctatctctttgctttagaaataagtctaagtaaatattaggatttaagttatcagctgttcgaaataatgctagctcatcatctgctttatctaaaccatttcgctctatatattcgtgataggaataacctgtttccgataaaatatttcctgcatttagtacagcttgcagagcagctacactcctatagggctgttggtttttctgttcagaaatatctaaaccattaaccaagctgatcaaataagaaactacattcctgtccaataggcacttaaattcaacacctggtgaataccagatatcagtcaaacttggatgtcctttcctgttaacattgagaggatcagatagtagtttattttctaatacgtgcgtttctgctcgtaatatttcttccagccgatcgtgaatgataagtaactccatgtcttgcatacaatctttacccaaataaccaagctttcacttcgtcataattttctaaatacaaaggtctgactaagggattactttcccttatttccttatctataaggtgatactgaatataatactcagccatagcagctctaacttctacagagaagctattcccctttcctttgtccatcataattacctgtttctgagattcagttaaggcgggttgcggcgcgattttcagtttaatcatggtcatccaagcttcatcttgttcatactgaacctcagacggctcattcagttccgcagcagtgattctaccaagatgaaagtctctaaattcactacgatattcatcatatgctcggcaatgccaacgaacaccactatcagctagtgcaataggatgaataatcctttcgatgccattggggttggttagagagtaataagtagccttaactgatagcttcttgtttatagcttgagttacaaccctaactattttggggtcaacgtttccagtatgtaaaggtccaaaatcgacagccaaagctccccagtaatcggatctatatacttgactattaatccttaaaaatgccacatactcctgccatgtttcatcaatatagtggcaggtgaaactagaagttggctcatactgttttaagcttttattatattccaatgaattagggtataactccctatattccgtaagacttttagtaatattgctaatggtgactttaaataattttgccaatgttgaagcgtttacaacgccttcccaatacgcaaacatctcgattgcttttagtcttacttcctttgtatttaatcctccattaatcatatggtttctcccacatttttaattaacttcaggggaacaccatgcgtgattaggtgttcttgtgttatggccaacttgttattttctaggttctttaaaacttctctaatttcatagggcgtaccaggagagttaagtcttcgtgtcaactgttcaaactgattcccaaactcctccagctttgatttggcaatcacatcctcaggaagtatgcttggaatgatcaggtcgatcactctatgctcagcgagctttaatgccatgtctattcccgcagcatcatagtcaaagaacactccaaccttagtgtctggccgaactttgcaaattaactcgtttaagtatttttgatttttaccataaccgcgaaatacggcgatggcactttgatattcaagcggtaaagaaggaatgactagttcccaatttgttatgagttccccattttcaacgatgattaatttacttatcttagtgacatcaatatcgcgaagcttcatggaatagacaatatttggctgtgcttcgattgcgtctttaattccagggatgattcctctgcccgtcattgagagcatcacttcaaaaacgcctccagatgcccatttttcattactaaaaaaggaggaagcctcaagcctagtttccacatctaaatcgatgtctaaaattggctttcccaataccttgttaaaataattttctatttcaattaggtttgatggtgtgaaatatatttttttatttctgattatgccaatttcgagttcttgaacaattgcacgcagaacagccgattcgctgatttgactgggagatcttctgattaaattctgggcagctcttatagtctttttatctagcttcatgagcaacctttctgaagagtatgtctttgacatatatagccccatcgaaaggcgctataatttctctaacttcttccacctcagctactttcagtactgcttttctctgggcctcaaaatagctcatgatcatcaacatccaatcttctggagtagactctacattcaaattatgaaatacagccatagcggatagatcttgggtatactcatcgtcgaagattgcatcaaagaaaaactctacattttgtatgagcgggtctagctcttcagcaatttcttcacctcgaccatctgtaatttctaccttttgctcatcaactcttaattctaagctggaactctttgatttttttagagccgagaccgccgcattaattaagtgctcttcatcttttgcactttccaaatcggcgaaaccgcctagagaaagcttatccgcaattgagacacaaataggcagatcagacaaagctgaaatgctaggcctatagcctggctctgatacatacttgttatgaaaggagtcgataagtttattgagcttttgagcgcttttatctttcaataacttatccagcatttttacgagtttacgattgctggctgccaagtcttttaagcatttgtctacatgccccttaagcgctttcatcagtaacctttcaagttggagatctagtccaacccaatcactcattttttcaacactcagttgagcaaatactaggtttagtttggtaatttcgtccttacatctcgtagtaagtttaattttttcatcgatatcaaacgccacgctaaattcgtcaccaataacgtgatggaacatatttactgtctctgtgagtgtgtccatgagttccatgacgatttctcttgtctcatcaaagaatctttctccatcattaaatcgacgtgactttgcttgtttatagctttgaattgaattttctaagtcatcaattaatccagaaaaagcaccatgcctctctctaaagcggtgcctactagtcacatgatcgagtaaaccgcgaactttactatggagctgtactcctagggactcatccaagtaataagccagtctatttttgcgcagagagtcaataaccttctcattttctggtgaatcttcaatttgccctctagcgacataacaagactcatctacgatctctacgtgtttattaagagctcgaattgcagcctttgaatcttcttttcttcccattaaaacaactccgtttgttgctctacaggttcttcctcctcgaagccgtcatacattcgaataaactctagctgatcataaatcagtgaccactttgcagtagctatatacactgaaccagtattaccaatgctagtgaagtacttttcattttctaagaagtttaaaatagaacgtagctttgacttcacctctgtagatttctgcgctcgattaaattgatgagcaatattgtccaactgcaagttaagagaagaggattcctctattgctgacaacaattctgattcatgtaacctcattcctgcttcaattggcctagactcattaccagcatttctgacgagccttagccaattgattaggccttccaaatttacgatgacattttcaaaatgtcgttcgactgcatttctcttttttgtttcttcaatggaactaaatacgcagtaaaaacctttcttatctctagttctaactacctttcgacctattctatggagaaaattattaatgctttcttcatgtcccgaattatctaaataagcgaagccctctggattcgtgacttcacaaataatattttgactcagaagctcctccacgcagttctcaaagcgactagacattagcttgctcctgttctttttcagctaatagcttagatttaagcggattctttttattagcttcgttagatacatatttcttaattccaagatttttatccacatgatttttcgtagaaaaatatctaagaagaaaaactgaaggattaggttgggcacaaaacaatgagatgttattctgatccataaaatcaaataaaagcatcacattttcatctgacaattctccaagctcatctaaaggccaatgaatggtaatgtttctgtctttacataaataacgagtcattccacagaaaactacaatcactgctagtttggatataccggtactgcttatattcttaagatctgcgtctgttctgatatttacaggtcgaccattttccgtcatagagatgtcaatatctaccaatgagtctattgagctagaaattttgctttgttttagctccgctattacattggaaaatgccacaatgaactctttttcaggtaagctttctcttcctgtttctccccatttattccaagcactattgaagctcctgagatcaccccaaaggtcaaactcatcgactttggataccaactccactctaatattgtctaatgcattaaagttatttgaagtgttaatctctttaaccagcttcgaagaaacatttttaacttttctttttaggccatcgagagcttgataaaagcgtatgtaccttgcgcccacagtttttattgactctagtattactgctttgatgtctggtatcgactcttcaattagcctctttacatcagtaacactttcaatatgaaattcttccgaaaatttatcatgaggagacagcgctatacgttgctcttccatgtttttccagatatgtaataccttattgttggtactgcctgtactcagcagtatgtcgccaactttcttaacagcagaactgattttatgtctaagtttattaattgaactcaagcattctttcgaagattcaatcagtaattctaatgggaatgattcatctaattggattggctggtgaccaataggaatcttttgtgtatgtaattctatagattcaagaatagaaataatcgctttctcttccttttcgagcttatcgtgctgttcggcgaggctctcaatatcatcggtcaggctttttcttgttttttcatattgctcttttgctaactcaagctctctatgagccactgaagccttatctaatagggcagatagctgactctcgtaattttctaaattaacccaagccgaactttcccataacctatactccgaaatttccttatcaaaagccttaacttctctatacttgctttcagattgctcttttcttgtgcgggcggcatcaattgttgtgggatctatttcctttttctttaactgactatcgaaagcagcttttaagtcgtctaatcgtttttttagctcttcttggctattggtaatagagtcatttttgacagaaatctcttcccgtaaaagacctatttctgccgatgcatttgccctaaatgcaagcttgtcttcctgaaacttagcagtttccacttctttaatattatttgtttctagctcaaagctttcgagttttttagccgacactaaaatacttacatttatttctttctgtcggcgttcgatattgctatcgattcgctgtttggtcttttgttgaagcaaagtacaagtttctatttctttcttgatacgatgctcttccctcactaagccatcagcctgtagttttaacttctcgattgatttattttgatcattcgcttttttctcaaccgcacctatatcagacttaatattttctatctctctccctaactcctctcttcgttgatttaaaatatcatcagataaagcttcttcaggaggcactacattttctaggtttatgcataacccaaatatgctgtttgtttcagcatcatcagatacttcaggagatagtgttctgaaagataataactcgggtctcaagaccttacctatagactctctccaatcaactatatttttattaagaaagcttcttacggtcccatcgtctggatttaactgacgtgttatttcaactcttctttcttcagtatcttccaactttttctttagtcttttgatttgttgaagcaagtcctccctagccacttttgcatcacgaacttcagcttcacaagtcgactttttctgggcgatgtcgtatataacgtaattttttaaggattcaactttactatttaactcttttaactccgaatcctcagtgtctgtatacttccctgcaatttcatactgaactcgacaattgttcaattcctcagacaatgacttactcaggagtgctctatcttcgctaacagcttccatctttgaagcaaattcatcgctcttctctagtagcctttgttcagtagccatctgaacttcatgtagtttttgggtcaagtcagcaattttctgggtttcagctttctcaaattgttctgaagctttttctactttacgtacatttgcatcataagcttgcgtctcagcgctagctgaatcgagcagatgcttaaagtgttcggcatcttgctctgctctgaatttaaacgcctctaatgaaccatactcagaaagcttcgtggcaatatcgactttttcatcccacctttcacgctcatcgtaaatactatcgataaggtttttcttcgtttcagcttgattggttagctcttggaatgttgtgttgagcacagaagtatcttggttgtatttttgttgtagttcacttctctcagattttaaacttgaaattctctttgccgccttctcaaatttatctttaacagtggctaattcctgttgaagactagcttgataagcaagtaagtaactccatgattcttttaaagcttcatattggtgtatggattcagaaaacttatctttgtgcttatctaattcaattaatgattcaatactactcacatactctgagtcgtctttgtgataaggggcctctccgatttcaatctgatctgtaagaaaactatcaaccaccataagtttaaattgagctaacagtttgtcatgtctcatcaaaaccgatgccaatgactcaatatgcctcatttgtgagtcatgagtgcatagagaaaatttatgagcttccggtgccaaagacgcttgtgcttttcttttaacccttaaacgttgcttgtcgttttgtatgaccgagcgatagtcaatactggtcgaaatttgctttgaaacatcaaagctgcttgcaactacatctttcaaccagtctttaacacttgcaactttgttcaaggtatctaatgtaacttgattaaacagcgcttcattagctgagccatcaacaaacctataagccactgcatcacgagatctatacaatactgcacatttgaggctaccttccttcttatactcaaacacaatcatagataattttgttggcaaataatgatcgacgaaagataactttccagcggccctatcaactactttgctcggctccatcccataaaaaacaggtattaaactaagtaaggttgtcttaccggctccatttcctccagtgttatttgtatgccccaagcattcaactggagttagcctacctttgaagtatgaatgatgaagataaatttgctctaacccagtttccatttaaacacccagaacatatatacatcgttttaatatacaccaaaacaatatatatgaaagctgtttatttaaacagtatgattttttaacaccttgaagaatgagaaccaatagttacaacgcatcaaacttgcctagaaccttaatgaataaccgtcatgtatcacaacacattgtttttaattgagtttattcttatggctggactaaacccgctctggttcactccataaagtcactaatttttaagactagctttcagttggactcggcttaaaagttgctgctagctcttcattactaatattaaaaagacgcagagccgcacgagcagaagatggcgattcaatgcgagcaaacaactcttcaaattgcatcgcatctctgcgcttttcaagttgttctatcaaagctggctcaccatgttggtatacgtctggtatatctaggttaatgactttgtccaaaaagcgctgcccagtgtaattttcaatacggcgaacatgttccttctccatgacaaatacgacatcagaccattcgagcagctcttcactacataatgttgtgttgtttcgcttgcactccttctcgctcaaacctgctgatcgatagacgcgcagtggatctttctccgcaaagtgctcttcagctgttttgctgcgatttaaattcgaggtgcataaaaataagatattcattacagcttctcctcagttgactgccgcttccactattgagcagctgctcgatgtaatagtctctgcgtatcgtcaaataatgcgccaaagtctttctcattaagctggggcggcaacataagctgaacggttggaatgtgtgttttagggcatatctcaacatgaagcacttccacttcgccgccttcaaccatgccggacagtgtccgaagtaatcgattcattatgaacacgaacttatcgtccaccagcaaaggggtgtaaatgagtacattcggtgagtgttcacgaaggtgctgttcaagtgcagtcgcatacatatgacccctctaaagcgataaaaaaaccttctatatagaatgagacaaaaagagggaaaaatctcggaagtgtcacttaaatctcggaagtgtcactaaaatttcgcaaaaaaattgtttaatgactttttacgaacaagcagcaaaacgattaaacactcaaaaaacgaagctatcgcaacctaattagttcaagtctgtaaaattccccattaacaaacttgaatagcagtaaaatctaaggagaaaacccattaaacataaccacgcattatgagctatcccccctttgtgataggttaagaggaaattagccgcgaacagtccattttcgatagttttttgtatttccaatgtcacttttaaaaagcaaagaaacgaatactctaaaaacacatgcaacaggtctcatataaaacattgatttataaaccaattaccaaaattcacagttttcctgtcaagcactttttctaccattttggttacaaaacaggcaaacgaacaacctgaatcaatgacttagcaaattcatgcttgcaattttttttgaaatcattagtctcttatttggagacaataaaacatgtttttggtgagagataggcattaaaaacctattaattagctgtttgagttgcttgtatcttacttaactggctttcttcgcaacgcagttgcggaataacaagattaattgataacaataaataactgtctaccaattttaaaaaattactcttttgaagtcccgcgagccaaaatctgctgagccaacccaaaagccaacggaaccttttcacgatagcgccttagccaactgtgaccacccacagctctatcgattgcagacaacgaagtaaacttaccttgcagcgcttcaagctgatcacacaacaccaagtctcgtacaacccagtttatgccttgaggcttacctggtgacttcgcttcaggaagctgagcgtataaccatgctttgtcgtgtttatagagccacatatatgcattacactgatgtttaatcacattgcgtgatgcatcaggaaaccgcctcataaagtttatcagcgatgttcgattgcttagtttccgctgctgcatcagaagatgatgacgccatgcggataaacctgcatgcgactgaataacttgctctacggctccaattgacaatcctagctgatgcgcaatgtcctgccgatgctgccctacaaaggctttacgccatatgcagcgttccatcggtggagtgatgcgtttgcgacgtctctcaatcgtaatttggtgtcgaagggccactcctttcacataacctacgctgcattttagctgtgcggcacactgacgaagtgaacagtgttgcttgagcagttgaagcaccttgcgctcttcgggcactgtatgcgttttctggtgcggtatgacggccgacttacttttctgcccagcaaagaactgctcaggtgagtcagtcaggtacgccattagtaatacatgacgaatataatgagttggtgcatcttgatgcactaaccggggtacaaaatgaaatgtagacagctctggaggcagcactttgccttgaacatcaaaaagagtgagccaagtacgctgtaattctttttttagctgtttccagcgtattcgcccaccagcagtgataaaacctttcgcatctaaccacgcaatgtaccgctcggacatacttcctagcggggtaaattggcttaataacgcatgtaattcggcaatatagcgacttaacttgagcgcattgggctctgcttcaagattgagcgttttgtctacaaagggcaattcgtaagcatggtttagcgccccttcaccggcttcaacggtagacagtactctcgcatgcacaggacagacagaaaccccatgaagttgatgcatggtgtgccaatacgccagcccataccgcgctttatcttcttccatacaagcacagcagcacttcaacacattgccaaagctcaacttgctagcagccattctggcttgctcgtagactgttgatgcattgttttgcacttcactgtttgccaatgcgagtcgcttttctttatcgctcaatccaaatgcgacgagaggatgggccgatgcttcaaggcgaaggtgctcaacggtgctgtctgccaatagcgccagtgatgataaatgccccggtaacagggcattgatacggacagattcgcgtccgaataaagtttggttcgtcactttccgcgaaccgtagggagacagtaaatgggctctcgctgccaagctatacccacattcaccgggtaaaagcctgagcttatccatgcgttgccagctcagggtacgttactgcaataaagtcttctaaaagcaaatacaccaaaggatgtggatgagcggctactgaacttatttgcgttaagtgcggacttagcatcattggatgacataaaacccctctgtgcagtttaagattacgaaaccaagagctgagctcgtactcactaaagtatgacaagaaacgtttttgccatacccccaataatcgccgctccgccacactgtttcgctcaagtgtcgatacctcagccaactcccgaacacgcttaactaacgctaaccgcctatcacgcataataggactatgagctagccgtagactcgccgcttcaattcgcttcatcgtatctgtcatcgcgataggtgcagcttcaagccaagctccgcaatcaggacaagtatttccctttggagggaatgcttgttcattcaatcgatgttgtcgccaaccacatgcctgacaactatcaattaatgcttcatcatgcttgtgacaataaaatacgccagccaactgatggtttcgatgaaagtacgccaaaccatattgagcttcgttttcacccacacacatcgggcaccaacgccagcgtgcaacatgcgttgactctcctcctcttacaacatggttaagctcctttgctttttcccaaactaaatcttgtggcaaaaatgctcgaaaataattcaccaaactatgttcagcatgaaattcactatcttcaagcatacccatggcataaagtgcctccttttctaatgcgccgaaagcctgatgaggtgacacactgcgcacagcaagtcgcattagcggctcgtcaggaactaaacacgtaacgcgttcaagataatgccagcgagccggggcagattgacaatcttccccaggcaatattgttcgccaatgagtcatcagtcttcccctaacatcgataaaaagttatcaggggacatcttgtcactttcttgactcgcatccacttcatacgccgatcgaggtggcttgtgaggtatcacctgcactttacctcttagcagctttgcgttatctcgctcatattcctgcatcatctgcttcgctttgctctcgacagctttaagcttttcgacatcatgatgggcattcttaggattaaccatctcaagtaaacgcatgggttttaagtcttcatatgctttgtaaccagaaccaacacgcatgctgtgtaatgccgcaatgggaccggacaaaggcgaaaactgtttgaggaatacatgctctaacgcggatgcagtcagagtttgtttggaagcttcaaaatagcttaaaaagcgcaatgttgcttgaactaccgatacggcaatagcaggaatgcccgcagttaaatcatgcagtttatagcgaagcgcttcatcactgtctctggcggctgagaatcgaacagaattgaataatgcatgacaaaggtttttccaaaatcctgattcgacatcacagctagccaaattgagtgaaccggcgcgaagtgtacgccgtgtaatagtcatctctttagcaaaaagctctagcgcactgaaggtgccaacaaaaattgtcgatacccctaaggtatttaccagttcttccacaaacttcatcgacgttttttcattggtgccgatcttgaaatcacttgagctaggcgcaaagttttgtgcttcatctatgattaaagcgccgatatgatgcttaacaaccgctttacgcaccgtttggatcagttcatacacgctactattacgctgcttatacgcatattgctcacccgttgcttcatcaatcgcgtctaatatggctgttaaaaacgctttttgaccgactcgatcatgatgttcaacgtatacatacgttatctgcgtcaatggacacggtttcattgtgccatccgacatcgaataggcagtgtgttcaatcttttgctcaatctgctccagcgcttgcttgaccatgctggacttaccgcgtccgctcaaaccggatatcaagaaggtatagctgttctcaagcaagtttaaacgcctgatatttaatgactttaaggatgcatctttatcggcttcaatggccgctaaaataccttgccagtcatcattgagagggttgcgcccgaggtaagacacttcaataccgagccgaatcgcctcataaatctcaaccatctcatcttgcacaacgtgcaaactaaacaagttaagaatactagagcgagtgtaatagccatgaagttcctctgggacaccagtcaaatctaatccgtcaacaaatgatactccgcactgtgtatgaatctgctgtttagcgagcggaaagcctaacccttcgacaagcgggttgccacggtgcatcggattgggatgacgaatatagttagctttagccatgagtcacctccacagcgttcggattaccaaacatgtctgatgaagaactgactaaatcattttgcgcaatatctttaacggcaccttgcatacctttttcaatatcttgttgatactgatgatgctgtctatcagactcggttttccgattatctttgatatcagacacaatccctttagcctgcgatttttgatgctgattagtacgcgttttagccattctctctaaggtgcgtaagtcagatcttaaaatcactgaactaatgcgagattgttcctctgcgacagcaagctgagactttaagatcaccatccgatgatgtatttgttcccagaccatgtttttataagcttcactgcgctctgtaagctcaagttgatatactgtcttagtttcttcgtctttgtaccagatatgattcgtcgagctctctgagtaacgaattgagatagactgacgaccaaaatttttagaaagctctaaaagcggcaaacgctcaaaatcagtagacgaataatacaaccccttgaaatacacgccttggcttcgcacactgacttttgcctccggcaacaaaccgaacaacaattgctcccgaggcaactttgcaggtgcaatgacgcagttgcttaagctgtaattccaagcatcgcgaggggcaaatgccacaccgtcgcgctccatttcgaaggtacgattattaatacgtgtggagtgattattagcgtgaagaacacacttaatgattgcgcgagttaactcatcgctagtcaaaacattgttgcggctaggatgttgttcatcaaatttattaatcttgatgactttaccgtgctcaagcggagaaaatgctttcttttgaataatatcgaaacttttctctacagtgcctttacacactcccatgtgatacgcatttaaattgaccacttctatgccaattttacctttgagcaaggcctccatattcttatcactgttttctgtaccacggtctgccgttaactcacggggaggatggcaacacggccaatcctcggagctgattttgactccgaactgtttgcaaaattcgactttatcagaacatgcattgagtaaagcgtgacaggcccctgtccagtcagggccatgaaaagcgatgtgcatgccaacgatcatactggtcacaacatcgaccactaaatacagaaccggtctaccaattgacattaactcattcgaaaactcatagcgcacatagacatctaatattgtgctatcaatttcatagcgacttgttgcaccgcgcaatccgtgcttcgcacttcccgttctcgctttgtgatctcgtgtatagtttttctcaccgacacgctttcttaaccacgtcaatttagacacaattttattaatttggcgtttgaacgcccttgacgaaatcacgtgattgttaccaaggggaacacgcaattcttctatcatctcttcaatcgttgccccttttggtcgaattgatacgctgccgtaacgatagatatagtcttcatataagtcttcaagtacgacttccttgcgattgcgtaagtgcgaacgtgcaaactgttcaatatcctcaacgtctttttgcgtgacatgacgataagcagttccgttaaccgtttttggaccgggtttggatgaaagatcgtgcagcccatcctcattcaatattggagagtcagggagagaaaagttttgaccgcaatagtaataattcgggagtaaggcattttttatcccaccatcccgaaaatagcgatttaacatgctagtgacatatttcttattgcgctgagaaagctcaatcagctcttgcaataatcccttaggatcaccaaatagataacgatgcaacttttcaggatccttcacaagaggcttaattgtcgaccaggcgacatctcgcatctccagaggatccttcacttcatcattagctgcatttttcttgagtaatttgagctttttagctaaaagcttttgtttgaaatagctgtcatcttcgaacaaaatatcgggtagatcaggaggtaacaatacccactctttacgttttactttctgctcaaaatatttaatatttattgtaaatggtcgacgaggtctgttacaactcaagtcagagacagcaatttcgtctttttcttccgctacgatgcggtatttcacttcggggtgcttcggattaacggaagcaataatctgattaacaaacatagtccacctccttcgctaccgctggtaacgggcggtttagattaatctcagtcgtccagtcaaaatgcagcacacgctcataagcgagcatctgaaaaatgctttggatctgatgtaatggcagattgatatcacttgcagtgcgttcaagattattgcgcactgtagctgtgggatagttttcgaaattaagcgttaagtgacaaagcacagcggatttcaagtcatcactaatatcaatatcatcaggagagtcataacattcgcgaaaataacgcagattgcttgttactgatttatcgaatgacttctcggtcaactgtgtccacgaaatattattttgtaagcagtagattcgttctatttccgctttagcgtttgtccgcgctacagcttgcggacttgtaatgtttttatctaacgcatcagagtatttgaaattataagcatgtcggcttttgtcggagtgaatcactaaataatccagcgtcatcgttttcgctggacgatgaccattgaaatttaccgcttcttgatacgaagatgggtgcacgatattaagctctgtagccacttgcattgtatctgctatgggaagcgggaattgctctaagatatttttcactcgtttgtttgcttcaaagtgaaaaaatgcctgaagttctccacggctcagaaagtgatgagcgcgtttggttttgtgactgtatatgatctgcccttgcccgaccgtgtgagactgcctgacagtgatccaggggcgatatccctcttttttgacttttgcataatatcgagcaatgcgacttcgctctttatctgtgatgataggttgagtgacttttttcatctagatttcctctttgaatagtaaaaaaagaggaagatagtcgaacgttcaaattacatcaacacacataatatactgataattaaaggattttattagtaggcactaataatttaaagtggtcaatttttgagcttttgtaaaatcaaagacttgaaaaacaattattaacagccgcttatatttaaatatagtatgtatataaccagaaagaataaggtatttagaaagagtatattaatgctgcaatttaatgagaaaagtaccgtgtaagaaccaagcccgatcgcaaatgtaactttttaccgcaattcaattgtagacaaactactgaacaactttctcctcaaagataaatccttccttttaaactcctcaattttctcatatgctgtaatttatcttggttaggagaattgcatatgtctgatgacatattaactattcaagagctggcggtttacctaaggctcaatgaaaaaacagcttatcgcttagctagcgatggtaagttgccaggtttcaaagtaggcggtagctggcgatttaaacgggtcgatatcgagaagtggattgaaaagcaaaaaggaatcagataatgcaacaagtgttaagctgggcaaatcaaaatgaaacacaggcaattcttctggctgttattggtttaattatatttattgttagtttaatacgtacctcaacaaaaatatttgcatcaaatagaggcgttagcgtaggtggtaactctagtggaacaataatcacaggggatatcaattctaatcgaccggggctgttaaatattttagcgaacatcgcaaccatccttggacttatagtaggtgcggcgactttatatgtcacctatttggctttcacaagtgcgggataaccaattgttcgctcaattatttaataaagttaaggttttcgccaaaaatagagcagtggccatcaaaggggataacaacggagttattttaacaggcgacattaatgactctatagtaactatcaatcaaaaatcattcgaacaaacagcattcttatcgcaagctagtgcctttgatagctataacaataaaatcccattactttgggcaacgcacgaatgcttaaaattactatcgccttctaaacaacctcaagaaagtttaaaaataaagtttattcaaaataagagtggcgttaacgtaattgtattgaatgatgcagctaaaaatataagcttacttcactttaaaacaactagtggcgatattgataaaaacgacctaaaagacattgtttcaatattgtcaaaagagtcgaaaccggatttatctttccaaattataactaatagggtgctctcaaagccggttaatgacttttactcaaaggctgtttctggcgaattcaaaacaaggttatttaataaagaaaaagactcatttactaattttaaagtggctactctcagcaatatttttcctagctcgactgtagaaactttaatcaaccaaagctatgcaacaccgcacattactcccgataatatagaatatgtaagtgaactaactaaggctttagctgtatacctaatatcacatggttcattaagtgaatacgcaacgataaagcgccatgatttagaagtaagatttggtgcagagcactataatgatatattcccatcacctccaaaatttgaagcctccataccaagtaagctgagaaaccaccaagagtcaattttacaatcaatactaaccgaaaacaaaaactcggtaattcatgctcgtggcggagttggtaaaacagtaatggctaggctagccaatacaataatcccctctcattctcactcaattgtttacgattgcttcggtgatggcctttatcgttcaattaacagcccaagacactcttttgataaagtattagttcaaatcgctaatgaattagcaattaatggtctatgcgaacctctaattgcaaacggaaaaaacatagagcgattaatgcaagagtttatttcttgcatagaatcctcagtgaaatgcttaaaaagagcaaatacacaggcacatctatatatatttatagatgccgcagataatgcggtcatggctgctaaggaaaaagctgaaaattcaattgttactcagttactgaatgatttaatgatagatggctgtactgttattgcattgtgcagaaccgagcgaattgaattgctagagcccagaaatgaaattgttcaatttgaattgagagagttttctgaaagtgaatcattcgctcatttaaaacattattattcggatgcaacagaagagcatgccaaagaatttcaccgtttatcaggaggtaatcctcgtgttcaagcatacgctattgaagagtttcctgcatctttgaatgatatgctacaaaacttaggaccaaccctaactactgtagacgctcaaatagaggttcagctaaataatgcaattgaaagactaaaaaataaaaataccgctacagaaggcttaaaaatcgatctaatttgtacagctttagctagtttacctccatttattcccatagacgttatatcaaaactctctaatcgttctgaagacgaaattgcaagcttcataagtgattttggtcgtggtttaatgttaatcgataagtgtattcagtttagagacgaaccaactgaaacatggtttaggaaacagtttgcttctacagctgaacaagctaaagagtttgtagaaaatatacaagaactagcaaattcaaacagctacgtatctgaatgtttaccctacctaatgttggcagggggaaatcacgaagacttaatagagctagcactttcagaagaattcttgcctaaaggcaatccagtggacgctagaagcatcagtacatcacgactaaatgctgcattgaaatcagccatacaactggaagattatttttcatttattaagttagcattgagaactggagaagagttcgctggtgaccaaaggcaaatagaattattaaatcaaaatgtaaccttaattggtatggttcaatcgcctaccgaaattcaaaaattagcgtttcaagggcgattatctggcggatggaagggatctgaaaatctttacaaatctgcactgctatcgttgcatggggagtttaaaggcgaagcactaagttatctaagagcagcagaaaactggttaaatacctacttaaaatcaacagcaaaagataaacgaaaaaggcatgaggaaaatctttctgctgaagatgttgccttactttttactgtctacttaaacctacttggtcctgagaaagcaattcatcgaatattaagttttgctccgacacaaggggttcaaaacgccataagtatctttgcagagagcttactcgacacatctagatttgaagatttacaacaactcgccctctactctaaagaacacagctatgtatgcgttaactttataaattcactattcttagtacaacattctgtagatgaggaaatttcaaaggtttgtttaaaaaacattgagttccctatcaatgaacgaaatgaagacgctaataactgcatttcaactcaagatttacttatatttatagaacactgttcttcttatggggccgaaggtgaaaggttgaagtgtttactatataaacattgtaaatttgagcccaaagcctggttcgcaaacccttcatcttatcacaatgatgatctcatagagttcattgaatctgtagctttactggaagaattaactggtgagacactaccagaaattgaaacctttcctaaagagttcttatctgaaaacttaaactacacacaacaacaggataaggataaatatgaaaaaactttatcagcgatggtgccagcacagcgttttctaattcgcaccagaactaataaaattaatgatttcgagtcggagttcagaagcacgtttaatgaagtgcaaaagcaccttcccgcttcttatcaacgccaaaatttcattcctgagtttgttagcaaactaaaacaaaaaagcatattctgctctaaaagtttaaatcaggaacaacaaaaattactactttcaaacatagtcaataacgcaccttatcaattgctactccaaggcctatattttagttgccgtgtaccaagcttgtttcatctatcagatacatatgaaaacgcgttagctgcgactatgttgagtcacaataaagaaggccctgaaagcaaagctagttcatatgttgatattgctacagccttatgttcattaacaccagcgttatcagcaaaatatttcaacaaagcaattgaagctgcctcaaaatttggtaatgaagtcctacatagacattttgctattttaagtttggctgagaaaaccgctgaaagtggttgctctgctgaattgacatatcgcttttctcgtagcaccgaaatcttttatgagtatatgtctgaccatttcccgttggagcgaacaattagagctatccatgatatgaacgcaccatcgtcatttgcaataatggccaggtggatagacagagaagttacatactggggccctttcgaagatacggtgatagcgtactcaatcccctgtaatacattgaaacctcaagaagcatgggctagccaaggattgattgacaagaatagatatgcagaatttatcagccaatgcttaaaatatgcagaaacccaagagcttcgcgctgctatttttagggatgctgctcaacaagcgttgattaaagggttatctaaatcagccttgttactaattaaaaatgctggtgccgagtttgaattatcatctcaacctcttaatgacgcaattctatattttgacaaacaacacactccagcgcggccaactcaaaggcattaccaatcagaagaaaaagttgacccagtagattggaacacggtatttaagtcaaacaactttataagctcaaaggagattgaagcctcacttcaaagctttaaagctttgaagaataaaagttatgacgaatgtttctggagtcaactatatgcaagagcaccaatcctagcagcagtcgatgttttagaagcaattttacaatgtaatttttcttcgaattacgaattattaaatgctttggaaaatacaccgaaagagtggtttgaacgagagggagtaaaagaagtatggataaaaggctttgatctttacgtacaattaaacgcaagtaccgtctcaaacccctggtggcctgagcactggacttcacgatttaaactagaaacagatttttcaaaactaaggctcccaggtgtaataaaagcattagaaaataaaagcgactttgatgatgctgaatttattttctctgttattacagtactatcacaacaactgactccttacgaagcaaaagaagctctaacttacgctttagacagggtagaactgcacgttgatgaaaatgatgctgatggagattggtcggaagatctgattcccactgaaaataataccgaagcttatgcatcttttatttggtcaatactagctaaccccacatcaaaaattagatgggaggcagtccacatcatctaccgccttgtagaacttaactgcgatgagatcattgattcaatgttcgctttattcgatagagatgagataggagcctttggctcaacacgttacccattttataaatttcatgctcaattatattttatgattgctatctacagaggtgcccaatcaaatgttcagcctttgtttaaacatagtgcattctttctaaaccaagcgctaaatgcaggccatattttgttagagcattatgcagcgaggatatctcaatgcttattaaaacaaaggaaagatatttatctcgctaatgaaaaagacaaattagatacggtaggtgttagtacatttagtaagaatatacataaagaaaccaataaatttgaaaaagctaatatttctaatattgataaagagttacccgaactatcattttttctagacttccaagaatactggataaagccactagcaaatgtgtttaatatatctgttaaagaattaaaacagacagcgataaacatagtagttaatgaatggggagttactttagacgaaaggtttattaaagatccacgacctcatggtcataaagaaacacatgcaagacacatctctataccgtcgactcagccctatgatttttacttggggtatcacgtcattttcacaatggcatcaaggttactcaagagccaccctgtagttgaaggtaagtatgactgggaagatgatctttgggctgactggatttctggccaccttttatcgatggataatggctatcttttggcagacctcagagatccagcacctttagtaagaagggagtggcttagcaaaaaaattactgactcatggagatgggaaattgaatatagtgactttctcgaaggactactattaagtaaaggtggcagaacatttttatgtgtgacaggttcttggtctgacaatgatggtaggggcaacaacgaaacttacagcgtctccagcgcactagtatccgttaacaattcagactccttgttaaaagctctagtttcatgcagaaatcctcacgattacaaattaccttcctataacgaggaacgcttcgaattagatgattccggtttcaaattgaaaggctggttgcttgaacctgacgagtataaaaaactggatgaaatagatccttacgctggggagctaaagtttccaatacgaagaatcagtaaagaatatgaagagttactcaatttgcattattccttacttactagaacatacttggatgataagggaaactctcaggggttctctgaaacatggaccgatacacgcagtaatgaccgttatagtgacaacataattcgcgacggtaataggctttatctgtctttagatatattaaagcatttatgcgttaaaactaaattatcactaattttggaagtatcaattaaccgccaaagctcaactcacgataaggatgcaccagacgatgtcaaatacccgggaccatattgcaacttgtatactctctcaaaagatggagtcatcagagattaccaatcaagaagttatcaacttaggtaaagctatcatcactgagctaggcatgataattgaatgtaatactccagcccgctggttagtacattatattgctgaaaatatttacaagtcagaaaactgtcaaggtgaagaaaaggaggaagctgaaaagaaatgtgtagatgcaatttttaagctttggcatcatcgctctgagctccctagaggtattaacccatttagcgaatttgattctgttttcagaggcctttcaaggttagataactcgtctcaaaaaccatacttcaatgaattttcacaatttgatcatcagatagctcctgaagaaacagctgaaagcaaaaaatgggttgatatagccatctctatcgataaagcagcaaaagagttagtttcagaaagctttaactcggctgctgcctttgctattacagagaagtctaggaagattctaaagctagcgcctgaaggttcaggtgaagatattaggataatgctcagctttctttctgatgaagaagctaattcaaaagaaaaagaaataaaggcgattgaatcaaaaatagaaaaagttgaagccctcaaatctatttgcgacgtgtttatagaaaaataccaaaaagatataagcctcattgaaaaataaaaaggcgaaccatctggttcgccttctatacttagttagtttccaacttcaatttcagtttccaacttcgattacgaggtttccaacttccattgttgttatcaaatcaaaccttaatcacggtatgtctctaccgctgggcatgaacaaactaggttacggtcgccgtatacgtcatcgatacgggttactgtaggccagaatttgtcttttgctacgcttggtactgggaatgctgcgtagaaacggtcgtatgcacgatcccactcattgcctagtacgtctgcttgtgtgtgcggtgcaaacactagcgggttgttttcaattgaccattcgccagatgcgatacggtcgatttctgacttgattgacaccattgcttcgatgaaacgatcaatctcaactttagactcagactcagttggctcaatcattagtgtgccagctactgggaatgacatagttggtgaatggaagccgtagtcttgtaaacgtttagctacgtccatttcagagatgcctgtttgttctttaagtgggcgtaggtcaacaatacactcgtgcgcaacgcggttgttacggccacggtataaaattgggtagtgctcgcttagcttctcagataagtagttagcgttcacgatagccatttctgttgcttgttttaagccttcagagcccatcatggcgatgtatgcccacgagattggtaaaatagccgctgagccgtaaggggcagcagaaaccgcaccgttaccgatgtttgtgccagcaacattaattacgctgtggttaggcataaatggcgctaggtgagatttaacaccgattgggccaacacctggaccaccaccaccgtgtggaatacagaatgttttgtgtaggttaaggtgcgatacgtcagaaccgattgaacctgggcttgtaacacctacttgcgcgttcatgtttgcgccgtccatgtacacttgaccgccgtgctggtgcacgatgtcacagatttcacgaattgtttcttcgtaaacaccgtgtgtagatgggtaagtgatcatgatacaagataggttttcagatacctcttcggctttcgctttaaggtctgccatatcaacgttaccgtttttatcacagtcaacaaccacgattttcatgcttgccatttgtgcagacgctgggtttgtaccgtgcgctgaacttgggatcaaacatacgttacgatgaccttcaccgcgtgactcgtggtatttacgaatcgcgattaagcctgcgtattcaccttgtgcacctgagttaggttgtagtgaaacagcatcgtaacctgtgatatttactaaccaatcatgtaactctgtcatcatgatttggtaacccgctgcctgatcaagtgggcagaatgggtgtaggtttgcaaactcaggccaagtgattgggatcatctcagctgtcgcattaagtttcatcgtacatgaacctaatgagatcattgagtggttaagcgctaagtctttgttctctaggcgcttgatgtaacgcaacatttcagtctcgctgtggtacgagttgaagttagggtgcgttaaaatttcgtcatcgcgtactaggcttgcaggaattgagttgctgccgtttacttcgatttcgtttgctagtgcgtcaacgcttaggccgtgatcttcacctaagatgatgtcaaataactcagctacgtctgcacgggttgttgtttctgatacagaaattgagtattcacctgcgcggttagacgcaaagttaacgccgtttgctactgcacgtgcaacaatttcgtctttgttatctgcaacaacagttagcgtatcaaaccatgtatcgtgcttaaggtttaagccttttgattttaagccagccgctaagatgtctgcaaaacggtggatacgctcagcgatagttttaaggccttgtggaccgtggtaaaccgcatagaacgctgccatgttcgctagtaatacttgcgctgtacaaatgtttgagttggctttttcacgacgaatgtgttgttcacgtgtttgcattgccatacgcagtgcgtcgttacctaaacggtctttagaaacaccgataatacgacctggtagtgaacgcttgtacttgtcgcgtgttgcgaagaatgcagcgtgtggaccaccgtaacccataggtacaccaaaacgctgtgctgaaccaagcactacgtctgcacctagcttacctggtgctttaagcagtaataagctcatgatgtctgcagcaacacaggcaatcgcttttttgctttgtacgccagcgattaaatcggttacgtcagtgatttcaccggttgttgatggatattggaataacgctccaaaaatgtcgtggtctagtgcttcagctgctttaccaacgataacgtcaaaaccgaactgctctgcacgtgttgcaacaacgtcgattgtttgtgtgtgcacgtcatcagcgatgaagaatgcatttgctttagacttagcaacacgctttgcaaggcccattgcttctgccgcagccgttgactcgtcaagtaatgacgcgcttgctaaatcaagacctgttaggtctagggtcatagtctggaagtttaataatgattctaaacgaccttgtgcaatctctggttggtatggtgtatacgcagtgtaccagcctggattctcaagtacgttacgtaaaattacgtgtggtacgtgagttgggtggtagccttgaccgatgtatgatttgaacactttatttttgcttgctactgattttaagtagcttagtgtttcaacttcagtgcggctttcgccaattgataaaccttgctctaagcgaatgcttgcaggtaccgtttgaccgatcagctcttcaacactcgatactccaagagcgctcagcatgtcgcttacttgcgctgggcttggcccaatgtgacggcgaataaaatcttgcttttgctctaattgttcaagagatttggcgtttgacatttgtccagattcctatgatccaaaaaaaagtggttactgccaatgggtaactggcaataacttaaaaacgtgttgatttagtaacttacagcgtatggaaaggtaagctataaaatcataaaagcccctgtgaaacccaagctacgtattttattagctggggatctagacggggcttttagtcggcgtgactaattaattagtcttcgtcgattgtgttagcgtagccttcagcgtctaacaggttatcaagctctgatgtgtcagatgctttgatacggaataaccaaccgtcagtgtacgggtcgttatttactgtttcaggcgaatcttcaagatcttcgttgattgcaacgatttcaccgccgattggtgcgtagatgtctgatgctgcttttacagactcagctactgcacagtcttcacccgcgtcaacttcatcaccaacttctggtaattcaacgaataccatgtcgccaagaagttcttgtgcgtgctcagtgatacctacagtaaacgtaccgtcaccttcgtcgcgaacccactcgtgtgaagtagcatattttaattcgcttgggatattgctcatctttttgttcctttggttctgttaccaatcatgctaacaactcaacatgattggcattattaggtgataacaccaaattttttatagtttagataactgatttgccgttacgtacaaagcaaggtttaacaaccttaacgttaaccagttttttacgcatctctacttgggctgtttcgccagttgaacgcggaacgcgtgctagcgcaacactgtgaccaagagttggtgagaatgtaccagaggtaatcaccccttcaccaccttcaacgatgacttttaaaccgctacgcaatacgcctttttcttcaagcactaaaccaactagtttgtctgtgctcttgtcagcgcgttgctgttctaatacttcacgaccgataaacttacgatcttctggctcccatgcgattgtccacgccatgtttgcagcaagtggagaaacactttcgtccatatctaggccgtaaaggttcatacctgcttcaagacgtaacgtatcacgtgcacctagacccgctggcgctacgcctgcgtctagaagttgttgccataaatcagcagcttgatcgttaggtactacgatttcataaccatcttcgccagtatagcctgttgtcgcaataaataaatcacctgcttgcacaccaaagaaaggcttcataccttcaacagcagcttgttgctctgcgttaagtactgttgctgttttagcacgtgcgttagggccttgaacggcaatcattgcaaactcaggacgctcagtaaccgttacggcgaaatcagccgaaactttagctaaatgcgctaaatctttttcacgtgttgctgagttaacaactaaacggtagttcatttctgagaagaaatagatgataaggtcgtcgattacgccgccttcttcgttaagcatacctgtgtaaagtgctttacccggtacagttaacttagcaacgtcgtttgccactagcttacgtaagaacgcttgtgcttgctcgccttgaacatcaacaattgtcatgtgagatacgtcaaacatacctgcatctgtgcgaaccgcattatgctcttcgatttgtgagccgtagttgattggcatttcccagccgtggaaatcaaccatttttgcgccagcttcaaggtgcttagcatgtaaaactgttttagaagtcataatattccttcacttttaaattaacccacaagttgtggggcgtggcctcaatttaatgagggggaataacatgggcggcgattatacattagttgcacagttgtcacacccaaattgcgattttgtaactaaaaaacagctaaacacccaagtgcgtagctgttttaaaaattttatgttttaagcaacgttggctaacgctaaatcaaagccgagctgctgtaagtgcgtttgccatttatcaagctctgcttggcgcgccaccagctgaaattgctgtgttgcttggttatctatggcggtaataaatacctcaccgctttgtgcaccatagcagctgcgcatgtctgataaacgcagccccggcgttagcttaaagctgtcgaccaaggcatcaaacgcttgctcaccacttagggttagtgcgcttaaatcgtcacgcattacataatcaatgtcgtaacgtagttgttgctcattaataagcgactgtaattgcacgctggcatctttacctaatacaaaacgaaatgcagtttcgttaaagtaatacagggcataagcgtagctgcttgttaggtcatcgtctaatgaactacgtaagcctaaaccgctggcggttagcttattaatatcaagacctaaaatagccgttaaaaatgggattgcttcagtgccactaaaatccataatggcagtatcgctatttgcttgtagcacgttgtctgctggggtctcagcttggctgtggcgagcaaacattattggcgtaaaagtcatatgtgacacctatcaatcattaatggctgaagtatattgcgccgtgctggcaacaacaaattgtaattatttatcaattgataaataatgcttatatacatagccctataaatagaattttttaatgaaaaacatttctaccgatagtttacgtactttagtcactgttgttgaagttggcgggtttgccaaagcaggtgaattattagggctatcgcaaccggctgtgagcttacaaataaagcgtcttgaagacatgctgggccataagctatttaaaaagcaaggccagcgccaagtgcttaatcaatatggcgaattgcttatgccattagcgaagcaaatgctgcaacaaaacgatgccattttacagcagttcaccagcgaaaacgtgaccggtaaagtgcgtttggggatccccagtgaatttgccgcacgtattttaccgtcgatcataggtgacttcgtggccctctaccctgatgtatcgctcgaagtgcgctctcgtttgagtaaacatttgttgtcggtctcgcgccaagatcaattcgatttagtattggcattaaacgaagagctagaatctgccaagttccctatctttatgcaagaccaactagtatgggtgggtgatttaaaccttgcacaaaatgatgtggtcacgcttgtaaccgcccccgagggatgtatttatcgccgccgcgcaatcgaagcactgcaaagtgcgggtattaaataccgcattgcctacagtaatgccgacttaaccggcctaactgcagcattaaaagaaggcttaggcattacggtgcttgcaaaaagcaccgtaccgaatgagcttaactaccaactacaaaccaaagacctccctgagcttggtcaaatcggtattagtttaattaaacgtaccgacgaccccggcaccgccgtagataaactcgccgaatttatcgccttacgtttgacgtaggtgtgagttttcaaaattgtaaaaacgattttatatctcgtaattcaatgaatactcacaaagaggtatagagacgcttcgcgctacataaaaaaagtaatactcacaaagaggaaaagagacgctacgctttagagttaaaactacataatcttatggtctttctcattatcttctctttgtgcaaaaaatagtgaaacgttgggtttcgctccgctctttccaacctacgagctaataaatcaagcaatgtaagtcgtcatttatggcgacacataatagttaaaattgacgggctaaagcccgacctacatcttgtttctgtggtttagataagcatcgcgcgaaataaatttcacgcctacaggtgagcatttcaatttaactatgcgcaggcacaatctaactaaaggttatagcttctttctcctttactctttctaactcgctaacttttgaatctgatagcagacgactcgagacgttgtgtttcgctccgcctattaagttttacttaacaccaacccaaacccgatatcgtaatacaatactactgtatttcttataagtgatttaattcataaacttacagttcatacctgttttattacaaataggattgattcgcattattttacatgttttaattgcgccggttaaaaaaatctaaacatacacaggacacacaatgacacctaagtttattgtttctacgctttcgactgcggtcgctttatctttaagcgctaatgcttttgcaaaagatgtaactaaagaagagaaaaacttcgagcaaatcactgtaattggctctgcatctgcaattaacgatattcctggctctgctacttttattgatgagcaagaactagaaaagtttgaatatactgatatctctcgtgttttaagtgctgtacctggtgtatatgtacaagaagaagacggctatggccttcgtcctaacatcggtatgcgtggtacgggtacgggtcgtaacgacaaaatctcagtaatggaagatggtgtacttgtagcaccagcaccttactcagcgccttctgcttactacttccctactatgggtcgtatggagtcaatcgaagtacttaaaggtgcagcttctgttaagtatggcccacgtacaacaggcggtgttttaaacttagtttctcgtagcttaccaactgaagggtctaaaggtttacttaacgccgagcttggtagcgacggtttctacaaaggtcatgcttacttcggtaaaaagaaaaacaatgctgcgggccttgtagaagtatttacttacggtgcagatggctttaaagatttacctgtaggtagcgacaacacaggcttcgaaaagaacgatttcttattaaagtttggctttgactttggtgataacgaagcacacagcctagaaatgaagttaaagtactcagacgagcgctctgacgaaacgtacatgggcttaactgacgttgattaccaagaaaacccttaccgtcgttatgcagcatcgcaaaacgatgaaatgaacacacaacacaatgcataccaaatcaactatgcataccgcttcggtaaaggttacgagttacttgctactgcttacctaaatgacttccaccgtaactggtataaagcaagcaaagtaggcacaagtaaccttgagcaatacagcgagtttgaagcaaatccaacgagcgaaggtattgaaggcgttgcagtaaaagcaaacaaccgtgattaccaagcgaaaggcttacaaactgaattccatatccctgcaggtagccactacatcactgttggtgcgcgttaccacgaagatgaaatggatcgcttccaatggcaagacaaatacacgcttaatcaagacctatcaatgacgctaactgaaaaaggcgtgccgggttctgatagcaaccgtgtagacagcgccgaagcgacgaccctattcattcaagatgagtggtcacttgatgcattagtcattagcgcaggtcttcgctacgaagacatcacaatcaaacgtgttgaatgggctaagtctgatccaaaccgtgaaaatggcctaacaaaagacatcagcaacgacacagagatcttagttccatcactaggtgctacttatactgtaagcgataacctaacgcttcttgctggtattcaaaaaggttacgctccagcggcaccgggtaacgcagatcaagaagaagaagagagtgttaacattgagctaggtggtcgttacgattacgcgggtattcaaggtgaagtaatttactttaactctgactacacaaacatgcacggtaactgtactgcggctgtaggttgtagcgatgacaacattggcgatcaatacaactacggtgaagtatctgtgtctggctttgagctaagtgcaggtaaagtatttgctgctaatgcagcttcgttccctgttcgcttaacttacacttacacggattctgagttcgacaacgcgtttgaatcagatctttggggtagcgtagaaaaaggcgatgcaatgccatacgtgcctgaaaaccaattagcgctttcagtgggtgctgagttctcaagctttgtattcgatacgcaaatgcgttatgtatctgatgcacacgcagacttaactagctcaggtcgcaatgcaatcgacagccgcgttgtatgggatttagctgctaaatacctaatcgacgacaaacaaaaagtatacttaacagtagacaacctgtttgacaaaacctacgttgcaaaccgtgcaaacggcggtattcaaccgggtaaaccacgtaccctacaactaggttacagctactcgttctaataaaacgacttagcgaaatatcaaaagccgtgtgatgaaaatcccacggcttttttgtgggtgagagttagcgagattgtagccgcgattttatatcgcgtaattcaatggatgctcacaaagaggataagaggcgctgcgctttagaggaaaaactacataactttatggtctttctcattctcttctcattgttttctctttgtgcaaaaaatagtgaaacgttgggtttcgctccgctcttcccaacctacgagctaatgaatcaagcactgtaagtcgtcatttatggcgacacataaccgctaacattgacgggctaaagcccgacctacgtgttgcttttgtggttaaataagcatcgcgtgaaataaatttcacgcctacggataagcatttcaatttaactatgcgcaggcacaatctaatctaacttctaaccactgatatctaatatctccattttttcgacgttaaaacgcctcctacacctcgtatctcgtccctttccccttgctaactcgaaactcactaatttttacacacaaaaaagccgcgatgatgggcgtaccgcggctttgtctaacttgaaaaatcagtttgctgggttacttccagcttctcatcttatggccttttaaggcgtagaataaaatgaatacataacttgggatcataacgatgtaagcaccttgtgcgccaaggcctgctacgtttcctaaaccgattagtaatggacctagtgcaccaccagcaatacccatgatcaataagcctgatgcggtgcctgttaagcgacctaagccagctaaagccagtggccaaattgcaggccaaaccatagcattagcaaagcctagtaacgcaatgcataacaatgggtctggtaattgtgggccaccaaatggcactaataataggtttgaaataatgaacgagtcattactgccaagcaccactaacaacacggtaataataccggcaatacccgacattaataacgccgtttgttggctcataaagcgtggaatagttaaaataccaattgcgtaaccaatcaacatacacgccatggtgtaagaggtcataactgaataatcagcaacgccaatttgtaatgcgtacgagccaatggtgtctgctgcaataacttcaacagcaacgtatagcgcaatacccactacacctaaaactaagtgagggtgtgctagggtttctttaatttcgcctttgccgttggatgtttcgtcttcatcaaatactaaatcaggcaatggtgcaaatttggcaaaggctgcaaataacataattaacgcagcaatcaatacataaggcatgataaggctatttgccataatgtctttttgctcttgcgataatttaccagcaccatcaacaacaccgcttacaactacagcggcaaaaataacaggcacaataacacccgcaaatttgtttaataagcccatgatacacacccgcacagcggctgatttctcagagcccattttcaccacgtatgggttaacagcggtttgtaatacggtttgtccaacacctatcattaactgtgcgaacaagaagatttcgatcatttgcagttttgcagccggaatatacatcagcgcagataaagccataatcgcacagccaatcgccataccattcttataaccaacgcgtttaatcagcatagccgatgggataccggcaactgttaccgcaatataaaaagaagagatgataaacgaagcttgtaacggcgaaagctcaagcatttgctgcaaaaatggtgtaattgcaccattaagccacgttatacaccctaagataaaaaacattgagccggccaataccattggcagccagatgctttgttttgtgttgttgtcacactcaaccgttgcttccataattgttctcttagtttaattatttttatttggttggaatctagtatacaactcaacagagctgttcaatttccataccaatcacaaaaatttaatcatacactaacaaaaatgacagcgctatcattttgcattcatataagtccaaaaaagccgcagctaattgcttagctgcggcttaaactaaatagtaacaactagttaggcgttatttaccaattgcttctttggcgaacaaatgtttaattgggccaaggttgtctacaaggcttaaaccaacaccacgtacgagttttttcagtgggttagcgcctgcaaataactcttttaagccttgcatcatggcaatgtgtttttgtgcatcaagcttacgagtacgttcataatcacgcagcgtgcgtgcacttgcaaattcaccttgctcgttacttaatagctcaattaaataggcggcgtctttaaggccaaggttcatgcctaaaccggctaatggatgaatggtatgcgctgcatcgcccattaaaaccactttgcccgacacccactgctgggcataacgcattttaagtggaaacgccatgcgctcactttgcacttcacataaaccacattggccatcgagggctgccataaccgctttattaaagttgttatcatcaagcgctaaaagtgtgtcgcaatgctctgggcttgttgaccaaacaattgagtgcgtatgtttctctggcaagggcaaaaacgccagcggcccggttggtaaaaacacttggcgtgccgtgttgttatgctcatcagcggttttaaccgtggcaacaatggcgtgatgatcataatctttaaaagtaattggcatgttgaactgcttacgaatagctgagttagccccatcagccgccactaataacttagcaattacaggctcgccgctttcaagagtaataaacacatcagaatcagtttgatgaatttgctggtagcgggtttcgaacaataaagtggcattactttgcttttcaagttcgctaattaaagcgtagcgaataatgtcgttttcaacgatatgaccgagctgcggtaagtcgagatcattatgatcaaaatgaattttgccaaagctgtcttgatcacgtacatccatcgacgtatatggtgtagcacgttgtttaatgatctctggccatacatttaatgactcaaataagccctgactagccaggcttaatgcgctcacgcgaagtgcgtaatcatcacccggtaaagtttgatttttactcgcatcaatcaccacaacgctgatatctgcttttgctaaaccaagtgctagcgtaaggccaacacagccaccaccgacaatacaaacttgtgcttgtttcatatccgtttaccttgcttaacctgacccataagctgttttgccagtggggtttttaacgaggagaataaatccattgagaaaagaccaatgctgcgaccaagcgcaagcaatcgcgatgagtttgaaaacaaacgcactaggctgtctgtgagtgtcatcacggtagtaatatctttactgcgagtttggctgtaataacgagtaaaagcgtaatcaccaaggtcgcttctatttgccatatcacacaataattgcacatcacgtaggcctaaattaaagccctgtccggcaattgggtggattgcatggcctgcattaccaattaatactgtacggtggttgctcagtgattcggctttaccgtacacaagcggataacttgcacgcatacccactttactaaatgagccaccgcaataaccaaatgctttttgcagcgcagctaaaaaggcatcgtcttcaagtgccatatggtgctcaatttgctcaggctccatacaccataccagtgagtatcggttgttactcattggcaacagtgccattgggccgtgctcggtaaaacgctcaaaggcatgatgatgatgaccaccagccacttcgatgttggcaataatcgccgcttgctgataagcgcgagtattaaactcaatattagccagtttacgactttgcgaatgagcgccatcagcaatcaccacaagttttgcgcttaactgttcgcccgagtttagcgtgatgatggcacagtcgcttcggtattcaagcttggcaaccgtatctgggcaaaacaaactaacatctgtacgagtaagttgctggtgaagactacgaccaaatgggttcacttcgaccacataaccaagggcatcatgaccatattcttggcaatcaatatgcgttttaccaaaatgaccacgatcagatacggttactttttcaatcgctgctgcaaatggcgcatggcaatcaaaagcattgattgattttaagtactgaacagactgctgagccagcgcaatgcttctatcatcaaagcttgggtgatagtctgcgcttacttcatttgcttcaattacagcgattgataactgattattgctctgttttaggcccagagcacaacttgctcccgccattccaccgccgataatgacaacatcaaactgctttgccacgcttgctcctagcctttatttgcttgcatcactgcttcaatgtcactaatggttttaggaaccgaaatagtcaggttttcatgaccatcttcagtgacaagtaagttatcttcaatacgaataccgatgcctttatattgctctggtgcttttgcatcttcgctaatatataaacccggttcgatggtgagcaccatgcccggctcaaatacgcgctctttttcatcaagcttgtattcgccaacatcgtgtacgtctaatcctaaccaatgaccaagaccatgcatgtaaaacgctttgcatgcttggtttgccataagctcatcaagctcgccggttaaaatgcctaaatcaataagcccttgcgttaatactgttgaggctaattcattggctttagataaactaccgcccggcttaacttggctaaatgctgcttcttgggctgctaatacaatgttgtaaagcgccgcttgtggttcgctaaatttgccgttaattgggaaggtgcgtgtaatatctgccgcataaccttcaagttcacagccagaatcaattaatactaaatcgccatcttttagctcagcatcattttgtgtgtagtgcaaaatgttggcgttgtcgccactgccgacaatcgtgccataagcagggtgacgagcaccattcattgcataatgatgatgaagctctgcttctaattggtattcagttgcgcctggtttggcaaactccatcgcgcgaatatggccttgtgcactaatttcgcacgctgtgcgcataatgtttaattctgcatcagatttaaacaaacgcatttcatgcactaaaccacgaatatctttaatggtgtgtggggctttgtagccttttttaggtgcgctgcgaagtgtgcttaataaatcccaaatttttgcatcgaaatttgcgtaagtaccttgcgcataaaataaaatctgctggccgttcaccaaatctaataattgttcatctagttcactaagtgggcacgttgcgtcgaataagtactcagatttagctttttcgaagccaattcgacggccatgccaaatttcagctagtttgtctttgttacgacaaataagcgtacttggtgtatcgctcgacgggcaaagcactaaaactgcatctggttcgttaaacccagtaagatagaaaaagtcactgtcttggcgaaatgcatattcagtatcacggctgcgtgttacttctccagcagctggaataatagccacgctgtttttatccatcatcgcaagtaaacgctcgcgacgggctttaaattcagctttatcgatagcaatagacgacatgctaaacctctgtaatttgattagtgaagggtctttttagtactttttcctactggctctttacctagctcagcaaaacataacaatgcagaaacacgcacatactcaatcacttcgtgcagtgcttggctgtcttcttcggtctcttcaaacatggtgtctaggcgggtaatttcactaaagtcgctgatcacttctttcacatcagctgataacttgccgtaatctttttgttttaaaccaaaaccaagcataaaacccgatacccaagatactaagccattggctaaatcgatcagcgtttcatcatcgcttggtaaaaataggtcaaactgaaattcttcatcactaaaactggcaacaacctgagaatatacatcagcaaaaaatgcttttaaatctttactaaaagcttggccatcgttgaatacatcacttaataaacctaagtattcatcggcttcaatattgatgccacaggctaataaaccacttatcacaccatgggcttctgacggtgcgacaaaaatttcatttttttctaataacaattgggcttgttggtaatcaggtaacgtgctcataactttttctttgttcggctaagtaacgtcatgctaccactcgataaatcgcaactccaattaattgtatgattgaggtcaaaaagcaatctgaaaagtaaataagcagttaaaggtggggaaaaactacgcgaacgatccgctttttttgcttctatggtttaaggattgaaacttgtcttatatactgaaggtgttccctagggtgcaggagcttggttaagtccctgagccgataaattttatgttagggtttctgttcgtttactattgtgcaagctcggcatgtaccgagaagcctacggtagaccgcagatccccgccctgaaacctcaaggtttcaggactgacaccgggcaccgcatacttggggaacaccatttctatttagttacaagctacaagctacaagctacaagctacaagctacaagctacaagctacaagctaccaataccttcccttagtttttctctaatacaaaacttattattattcgcgtgaaataaatttcacgcctacggtattatttagtttcaagttatcaatactttccctatatttccctttacaagaaattttagttttcggcgttgaaacgcttcctacatctcgaaactcgttaactttactctttccccttgctaactcgctaacttgtttgtttttctgatagctgacggctgaaagctgatagctcctgtgtgttgggtttcatttcactctacccaacacacatgttttcaacctatcgcccctacttaaaccatccctgaaagcgctccattaataggtaattaactggcactaatagcaaggtgataagcgttgcgaagataatcccaaagccaaggcttaccgccataggaataaggaattgtgcttgcgttgctttttcaaatagcaatggcattaaaccaataaaggtggttaaactggttaacataactgggcggaaacgtgctgcccctgcaaccttaacagtttcaagtaagtcaccgccttcttcacgcttcttattgataaaatcaaccagtaccagtgagtcattcactaccacgcctatcaaggctaacatgccaagtaagctcataatggttaactccatacccattacccagtggcccattaccgcacctatcatgccaaacggaataacactcatcacgatcaatggctgggtatacgacttaaacggtatcgctaataacgcataaataataaagaatacaaacacgaggccccaagccaatgaaccaaatgactctcgctgctctttggcttcgccttcgagtgtgtaatcaacacctgggtattgcaccattagctcatctaagtaagtttttaggtctgcttgcagtaccgtcatattggtatttgatttttcaacatcagctgtgacattcaatgttcgatagcggtcaatacggtaaatagacgatgggctttgccccggcactaaagtagccacatgcgaaagcggcacagtcccaccagcaggtgttttaataagtatgtcttttaagtctgcaaccgagcgacgctcttcaatcggtaagcgtaccattacccgcacatcgtcgcgcccacgttgaatgcgctgtacctgcgctccaaaaaacgagttacgcacttgctgcgatacatcaacacggtttaatccaagcgctaaaccttgctctgtcagctcaatttgcaactcttctttaccatctgacatgctatcggctatttcgtacacagttggatacgtcgataaacgcactttaactttttcagcaactgcttcgagggtgtcgattgagctaccgcttagctgtacatcaatcgggctagatgttcggccaaactcagcacgaaaagtgacactctctgctcccggtataataccgataagatcacgccattcgctggcaagttctcgtgagcctatatctgattcacgcttttctgctggcatgatctcaaatctaacactaccggtatttgacgaaccaccacggccacctgtggttgccaaaatatttagaattacactttggccatcttcatcgcggtatttatcttgtaattcttttgccttgtctgacattttaatgacgtatttattggtcacttcaaacggtgttcccgcagggaaagttacggatgcacgtacagtttcacttggaatacgcgggaaaaaggtaaatttagtccaaccacttgtgatcaaggtaacaataattacaaaaatccccacaaataagctaaccgtagccattttattctttaaagctagattcaataatggttggtaatacttcattattgcgtgttcaaaaccatcagcaaaacgctgttgaaggcgctctagtctcgatggctcgcccttttcatgacgtagctttaagtattttaagtgtgcaggtaatacaaacttagactcaatcaaagagaacagtaaaacaggaataactactactggaatttgtgcaaatatagcgcctcgagcaccttcgataaaagcgagaggtaaaaatgccgcaacggttgtaagtacaccaaaggtgactggagttgccacctcttgcgttccacgaatagcggcttgctcaccactttctgcagtttttaaatgggtatagacgttttctccggtcacaatggcatcgtcaacaacaataccgagtaccaaaataaaaccaaataaactgataacgttaagtgtaataccaaatatcggcatcattaaaaacgcgcccatgaacgacactgggataccaataaatacccaaaatgcaatggctggacgcaagaataaggtgagtagtgccaagactaaaattccgccctgaatagcgttactggtaagcgttgctattcggctttttacaacttctgagtcatcatcccaataacttaactcaaacccttctggaagctggctttgatgctcagttatgtaattttttaccgcatcagcaacttcaatcgcactttgcggaccaatacgatacacatcaataaatgcagcttgcttaccattaaagcgagtacgaactggggtttcttcaaaatcatcactaatacgggctatatcacctaaacgaataatcgtgccatcagcttggttttttaccactatattagcaaattcatctttgcgataagcttggcctttcgagcggatgagtacatcacccccttctgtttttaagttaccggcagacacatcagtactagaattgcgaattgctgatgatatgtcagctaagcttaaatcatactggcgtaaggtatcttggctcacctctattgctatttcgtaatcgcgaaccccacttagctcaacttgagttacacttggtaaacgcagtagttcatcacgcacggtttctgcgtattcaagggtttctttttcgccataaatacttgaaacagatactgctattacttctcgcttccattcagcaagcgaaactattggtttttcagcatcgacgggaaaggtgttaattgcatctactcggcttttaatgtcagccaaaagctccctaggatcatacccagtctcaacttcaatacttaccgaagaagaaccttcagaagagcggctagtgatacgcttaactccctcaagatcttgcaccgcttcttctatgcgaattgatacccctttttctacatcttcaggagttgatcctcgaagtgatacactgacactaattcggtcagactcaaacgatggaaacacttcaagtggtatttgcgtcgaaacgctaaataaacccgctaataatatgctgatcagcaataagtttgctgcaacatgattctttgtaaaccaagcaatcattattgcgctccttgctctttaggcggctgttgattgcttgaacgcttagcttttcctctggtcgcctgatactcttcgctacccataacggtaacttgcgtaccagagctcacttgaccaagcggtgtaatcaccaagttatcgcctgcagacaaaccatcagcgacaacagcttggttagcgttttgccaagcaagtgcaatatttttacgacgcagtacaccctgctcttctacgtaaacataggtgccttggtaaattgcgctatttgggatcacaatggcattttcaatggctttaccagtaatttgtgctttgatgtactgaccaattttaattggatactgattcacagtcgtggctttataagggtcgttaatttgcgcaaccacataaagctgctgcgcattttcatctatagcgccttcagtacgaataacttgaccttgccaatgctgtttaccaacaaggtctgagctgaattcaactaatgaacccgcgctatttttagcgccatcacgaaattgctctggcaaattaataaacggtaagtctttatttttgattggtaaacggatctcaactctatcgatagcataaatactggcaagctccatgttattactcaccacttggcctaaatcaacgctacgacttaaaacacgacccgcatatggtgctgtgatctttgtacgctctaaatcaagcttcgctttttcaagtgtcgcttgcgcagacaacacactggcttcggctgctgctaattgtggtttacgaagtaccaagctacttgcttgctcgcctttacctaagcgcttccagtcagtttcggcctgccgaccacgagcctgttcttcaagtaaaccttgctcggctgttaataaggccgcttgcgctgattttacttcggcacggtgatctctatcatctaatcgcaacaacacatcgcctttttcaaaaaagccaccttcgcgaaattgctcacttatttcaataatttgccctgatgcttgcgcgactaacatactttgcgttcgcggttttacggtaccaaaactatcaatcatcacttgataagtttctggcgttaaggttttaacagccacatttactttcgctttcggtggtgaagaaaaacgatttgcttgcggcgggttacctttaataaacatgacgagtaataccgtcacgacaatgacaataactggaattaatattttacgtgtcttagtattcatgattattgctctgctacttcgctatttgcttcactaaagtcaccgccaagggcaatgtgtaagttgattctatttttaataagttggtttttgagttcgataacagagctttgcgcgttaaaagagcgatcttgcgcatcaagcactgtcgtgtatgttactaaaccactttgatattgctcaaaagacaaacgctctgcggcaattgcattttcttgtgcttctaaggttttttcataacgcactttcaatgcttgctcttgactgattgcagtttcaacttcattaaatgcatcatagagtgtggcaaggtaagcttgctcctgacgtttaacgctaagccttgcctgctcttcattggcttttaagcgaccaccttcaaaaagcggcattgaaatactacctatcagtgaccaagctaagcttgaaggcgaaaataaatcactcactctatctgtgctatcactgatagatgctgaaagatttaagctcggaaaacgttgtttgtgcgcgtaagcaagtcccgcatcagtacttaacaactgataccagcttgccatcaacgctggtttgcgggtgataagctctgaaggtaaacccaaaggaattgtgttctcaagtagtggcaaatcggcactaaccgataatgccccagcaggatattggcctgttaaacgctctaaatcacgaattgatttagttaaggtagcttgctgtgcagcaatattcgagcgctcagtatttagctcattacgggcaaggtaaacgtcaagcgcttcatttaaaccttgacgataacccgactcaataatatctaagtttttctcggcgttttgttcgcgctgcttatatagttcaagtaatttgtggttagtaattacatcaaaccaacccgaaaccacatcagctactaattgttgtttgctttgcgaaaatgtggctttttcagctaaatattcaaggtttgcttgccgttcagaggccgataatttaccccataaatcaacttcgtagcttaattctaatgatgctgaactagcgttgttataactaacagggcgattatctttactacggctcgctcgtgttgataaatcaaggcttggccataaatcggctccagcagcaataagctgttgctctttaatcgccacatcataacctgcttgtaaaattgcttggttatgggctaatgcttgctccactaaattaaaaacttgagggtcttgtaactgctgcaaccaattatcttcaacagcaagaattctgttgtccgaaggtaattgctgccatgcacttggtaaggtctcaagctcagcgactcgttcattatgagtcgtctggcttgcacatgcacttagcaaaattacacttaaagccaataaactcggcttatattgccaattcattctaaaaacctgaaaaacatctatttatgattgtaattcaagcactaccttaagttttgctcaactgactttacataacattacacagtctggtatttggtaaggatgaactgtagaaaaatagggataagctgcgagtttacaaaattgtagcgattttataccgcatagaaatggtttaaatggtgaagaatttaatttgataacacggggtaaacccgctgctacgagttcggcgttgaaacgcctccaacttctcgagtctagttccttgtaacttgctaactttactctttctccttgctaactcgtatattttaaatctgatggctgataactctgagttcgttgggtttcactccgttctacccaacctacaaggaaacagaaacaaaaaagcctcgcgattgcgaggctttgaatcaatggtgcccagaggcggaatcgaaccaccgacacgaggattttcaatcctctgctctaccgactgagctatctgggcattttaaactttcgtttaaaaataaatggtgccgactatccgagttgaacggatgacctactgattacaagtcagttgctctaccaactgagctaagtcggcacactaaacctgtgtgcatttagcacttaatcacattgtgattataaataatggtgcccagaggcggaatcgaaccaccgacacgaggattttcaatcctctgctctaccgactgagctatctgggcaaaatttagttttatgcagaatatcaacaaggattttcaatgcaattcccgatggctctaccgactgagctatctgggcataacataaagctataagcttgatgtttaaataaatggtgccgactatccgagttgaacggatgacctactgattacaagtcagttgctctaccaactgagctaagtcggcacactaaaatcgtgtgcgctgtgcactataatcactttaaaagagattatcaaataatggtgcccagaggcggaatcgaaccaccgacacgaggattttcaatcctctgctctaccgactgagctatctgggcattttaaactttcgtttaaaaataaatggtgccgactatccgagttgaacggatgacctactgattacaagtcagttgctctaccaactgagctaagtcggcacactaaatctgtgtgctatgcacgatactgatgcttagtcttaagcaccaatatattaaataatggtgcccagaggcggaatcgaaccaccgacacgaggattttcaatcctctgctctaccgactgagctatctgggcaaacttcggttttaagctgaaaatcttataggattttcaatacaacttccacagtgctctaccgactgagctatctgggcgtgcggcgtattaaacgggttttgccttctcaagtcaactattttttgaggattctatctgtttgcacagttttcaatcaagattgctgtttttaatggtttttagactatttattcaacaaacttatgcgtttttacaacgtcttatgtttttaatcaatttcctactctaaaaacgtggtgaatttttcttcattgatggtaggattatctaattatcaagaatatacctactattgcagtataaattgttggattaaagctatgcgaagtaaatcaacttctcctgtaaaaggcctgttaccgctttttattattacgaatcttgttatcacacttttagcagttattgctctagctttttacccttccaacaattctgaaaaacaatcatcacaacccaaactcaccgcatcacaagttgcatctcagttatcagctcctttggtaagcgcattaacaatgccaggacaagataaagtaaaagaggtattagatgttagtttgttgctaaacaataattttgattactacttataccgatatgaagtaaatggtgatgtctcactggtgtttgcaagtaatcaagagcaaattgatgcaagtaaagttaatcagcaactcgaacaaaacatgcttgttcatactgtacttgagtttaacgaccaaccagtcggcgagcttatagttaaacagcatccaactgaacagcctgtagttcagtcagctgggatttcatatgctttagccgctttagctgtattagcgctgataattttgtcaattgcgatgagtatatttatcaataagcgttttactaaaagtagcggctctttaagccaagagttaattgcgatcacgaataatgcagactacaacacgcatgttacagagaatcttgagttcggattagatattgttgctgaaaatatcaatcaattgctgagaaaggttcaatccgcaattaaagaaaacaaagcagcgcaagccgatctgcaaaaactacaaagcagcctagaaacagaagtacacaacagaactctcgcgcttgaacaagcaactttaaaagcagaacaagcgaatgagaccaaaacaaccttcttggcaaccatgagtcacgaaattcgcacaccgatgaatggtgtgattggtaccattgatttacttcgccaaactgagcttgatggtgcccagcacaggctaagtactattatccgtgattctgcgttttctttattaggtattttagacgatattctcgatttctcgaaaattgaggcaggtaagcttaatatagataatattccattttctgtttcggatactgttgaagaagtagctcgcgttctgtcatcagttgcaaaaaaacgaaaccttgaacttgaacttgctatagcacccgatattcccacaaacttaatcggcgataccgttcgagttcgtcaggtactctataacctatgtagtaatgctattaagttcacaagcacagatgaaaacaaaaaaggtcatgtaaaaatatctgttgaggttgctcagaacacaaccgatcattacacattgcgttttactgtttctgataatggtaaaggaatgacgcaagcccagcttcgtgaaatttttaacccctttattcaagccgaaggctctattactcgagaatatggtggtaccggtttaggattatcaatttgtaaaagcttaacagaacttatgttgggcagtatttctgttagtagtgacttaggtattggtagtgaatttgttgtcgatttaccatttagcaccgaaggtaaagtagatctcgcccacagacatacaatgaaaggccatcgtgttgttgtggtaacacaacatagcggccgtaaagctttgcttgcccgttatttatcttttatgggagcgactcatgtttttgccgatagcaatgatttaatagaggcggaacaagataacgaaaacattatctggatcctcgatggtatagagggaatggaggatattaactatatcttgcgccgtttactctacacactagaagataataaccagcaagttatcgtgttgagtaaattagatgaagcggcggtaaatcataaaaatatcttctacttaaatgcgtcaccattttgtaagtcaaacttcatgatgtcgctgttagtggctgcgggtttacacacacctaaacaagttgtctcaaccaaatctttcaatgattacttgagcgttgaccaagctcgtgacgaaaacaaactcgtgcttttagtagaagataatgtgctaaaccagcaagtgttaacagatcaacttcacttgttaggctatggtgttgagcttgctgaaaatggcgaaaaaggtcttaatatatggcgagaaggccatcactcaattattttaactgatttgcacatgccaaaaatgtcagggtatgacatggttgaaaagatccgcaatgaagcatctcaactcgaagacattaatgctcaaccttacataattgctatcacagcaaacgctcttaaaggcgaaaaagagcgctgtttaaatgtaggaatgaatgactatataacaaagcctgttgagttaaacgtacttgaagccgcacttcataaatgtgcttataaagctaaccctgaagaggtgaaactggccccacctaaacctgctatccctattgatatgagcgtattatctaaatacgtaaataatgatgaagctaaaaagctacgcttttataaaatgtatttagagcaaagtaatcaacttagtcgtgaagtaaatgcaggggttatcgagcttgatcttgagaaaataataaactcatgccaccagttaaaatctatctcaaaaacgataggtgcaatgaaagtcgctgagttagctgaacaatttgaacatcgctgtaaaaatgaagaccctacaagtgatgaattaattgagcttagagataattatgaaattgaatactctaaagtcgctcaatatataaaagagcaaatacaaaaagccgaacaagaaaacaaatagtacttatcaaaaaagggccataacggccctttttactttattttcttggtttatttttctggtggacggtagccttcgatttctacgtctttaccttcaaataaaaaaccgaccatttgctcttctaaaaaagcacggtgctctgggtccatcatgtttaaatgcttttcgttaatcaacatcgtttgcttgtgttgccattggccccacgcttctttactgatgttgttgaaaatcttttcaccaagctcacctgggtatagttggaagcctaagccttcagcttctttttgtaacttttgacaaaatactgtacgtgccataattgctctctactcttattgcgtgatgctattgtaatctattgtgcttaattgtttaaccagctttttcgttggggctgcaaggccaacttcaactgactcatcaagcggataccaaaccagttgtcgctcattgatgagatctggaatctttggcaatgttaaaacatgcggattaatggtcagttcaaaatgcgaaaacacatgggtaaaggcttcaagtgcctgcgtatttgcagttaaaccgtgctgagctaaaaatgtttctagttcagttaattcgctaaactcaaaaaagccaaacaagccgccccatattccagagctcgggcgtttttccataagtactttattgtcacaggctaggataagctgatgacatgactttttaggcactgcctttttcggttttgaatgtgggaactctttaactttgccttcattaaaagcaaggcatttactatttaaagggcacggctcacaatcaaatttactacgcgaacaaaggcttgcacctaaatccatcattgcctgattaaactcagtgaccgactctttaggggttaattgcgatgataatgaccaaagctggttttcgacctttttcaccccataccagccttcaatcataaaaaagcgcgccagtactcgttttacattaccgtctagaattgggtgatgttggccaagcgataaagacaagatagcccctgcagtagagcgaccaatgcccggcaagtccataacctcttcaagtgtggttggaaattgcccttggtatttatcacgaactatttttgctgttttatgtaagttgcgtgcacgagcgtaatagccaaggccagtccagtggtgcaacacctgatcttcatccgcatttgcaagcgcaatgatgtcaggaaagctttgcataaacttttcaaagtaaggaataacagttacgacttgagtctgctgtagcatgacctcagagatccataccttataaggggttttatttaactgccatggaagagttttacggccgtgaaggtgataccagtcaaccacttggtttgcaaaccaagttgactccttattgcttaaattcaaaataacatctttacttgctgaagctcattgcggccaagtctattgcagttagttaggccaagcaagtcgaacagactccgccttgcctaaatagcccacatatggctgcaaaattaatctcgaaagataaacaggttcttactattgtactcaaggcgcaggtcagggataatacgcaacctttttctatagtcagtgttttttatcaggccaaattatatgaatgactcaagtaacccaaacctcgagcaagcaaagcaagagggtaaatatatccgcacgattcgtagtttcgttaagcgcgaaggtcgcctaacaaagggccaagcagccgccatcgaaaagtgttggccaacaatgggccttgagcataaaaatggtatgctcgatctaaaagaagtattcggtaacgataacgatgtcgtactagaaatcggctttggtatgggtaaatcactggttgaaatggctaaaaacgcacctgagcttaactttattggtattgaagttcatcgccctggtgttggcgcttgtttaatggacgctgacgaagcagggatcaccaacttacgtgtattcgagcatgatgcagttgaagtgcttgctgattgtattgctgatgagagtttatctaaactgcaattatttttccctgatccatggcataaaaagcgtcaccacaagcgtcgtatcgtgcagcctgagtttgcgcaaaaactacgtagcaaattaaaaattggtggtgtttttcacatggcgactgactgggaaaactatgccgagcatatgcttgaagtaatgcaagttgctgaaggttacaaaaaccaatcagaaaccaatgattacgttcctcgcccagattcacgtcctttgacaaaatttgagcaacgcggtcatcgcttaggtcacggcgtatgggacttgatgtttgagcgtactaagtaataaaaggtaaaagcagcatgagtaagttaaccaacccaagtttattattgcttcgaaatgaagacgaacttgttggccagtcgattttagtggttaactttgagcaagatggctttttacgcgaacttaaaacgctaaacccagacgcaaaaattactgcgttcagttataaccacgctaatgccatgtatgccagcaaaattgcaggtgtacatgctgtggttgatcacactattccaaatggtaactacgatttagttatctattactacccaaaagctaagccagaggcactaatgtgccttgataatatccgtgctgtttgccagcaagatgctcagctttttgtggttggtgaaaataaaagcggcgtaaaatcagcagagaaacaactaaaggaccactgcggctttagtaacaaaatcgatagtgctaagcattgtattttgtatatgttctctgagcttacgttaaatgataacttcgatatcagccgctatcacaaacaattccaagttaaagctggtgatgctgaattcactgctatcagtgtaccaggggtatttaatcacggtgctcttgatgttggtaccgcggtactacttaaccatgccccttctattaacaagggtaaagtgctcgattttgcttgtggggcaggcataattgccacctacttaggtttaaagcagcctgagctagaatttgtttgtagcgatgtaagtgcccttgcaacttacgccacagaacaaacactggcactaaataatctcaaaggtgaagccatattaagtgacggtttagcaagcattgagggtaaatttgatttaattatcagtaacccgcctttccacacgggtattgccacagactacaccattgccgaggcctttctaagctctgcaaagcagcacttgagtaagcaaggaaaattgaccattgttgctaacagcttcttaaaatatccacccattttagaagcgcaatttggccagtacagcaccgattttaaaaatactaaatttgccgtttactcagcttcataacaatttgtaaaatagcttattcataacaaaaatattttattaaatatttagttactttttctgtttttgctagacttaatttttaataacaatataaaaagattggccttctatcgcgcatgtcactattttcggcacaaacaagtattcgtaaagcgttggcaaatgcggtcatgctcgtcactgcgctatgcctatctttgtcgatttcgatatcgacttatcttgacgttaaagaacaaaaagcgttaatagttgacaaaatcaccctacttgcagaaatcattgcctacaatgcgcaagtaacagtgctttttgatgataatgaaacagaagcagagcgtttaaaactatttgaatctgtgcctatgatcaaaaatgtgcacatttatgctattgatgagttatcaaataagcctaaattctttagtagttttaacgcaataagaacccctccagtaccaattaaagttaataatattgatgagctattagaacctcaatttaaaaataaagcgatagagctaataaaacctattgtttatgaaggtaatacgattggctatgcctatgtccgtggtgacttagaaagactaaaccaatatattaacaagaagatttttatcgatattttgttgactctttttgtcttggttattgtgtattttgtttctagacgcattcaaaaacgcatagcaagcccaatcgataatttgagtaacctgctgcaagacgtatctagaaaccacaactacgaaacacgtgcgcaaaaaaccaatgttgacgagatcaatcaactagctaatagcttaaatatcatgcttgcccgtactcaaaagcagattgagcgccatgaaaatgacaagcaagaaattaagcaactgaaccaaagccttgaagaaaaagtaaatcagcgcacaatcgccctacgagaagcgaatcaagagctactcaatacccttgagcgaatgcatcaatatcaaaaccaaattgtagaaaatgaaaaaatggcctctcttggccaaatggtcgcaggcgttgcccatgaagttaacacgccgattggtttaggtatcacaggttcaacattacttcgcgataaacttgcagaaataaacagtttatttgagcaaaaaaccttaacctcatcacacctaaagcgtttcatagatgatggtattgaaaacctcgacttaatttatcgaaaccttaaccgtgcagcagaattggtttctagctttaaaaaagtagctgtgaatcaagatgtagaaatgagtaccaaaataaatctgcatgacttattaagtgatgtaattatgtcgatgcgctcagaaatacaataccgcaacccaaaaatcattatcaattgtaatagtaactttagtatcgaaactaaatctggaccgttacaacaagtattacagcaactgttaagcaattctgttattcacggctttactgatgatattggcaacgaagttaggtttgacgttgaacgtaatgagagcagccttattatcgattactatgacaatggtattggtgttgataaatcaattaagaagcgtatttttgatccttttgtcaccactaagcgaggtgaaggcggaagcggtttaggtatgcacctagtgtacaaccttgtaacccaagcgcttggaggaacgattgtatatgatgagcttaatcaagaaggcgtgcactttataatcacactacctttgcatgaaggtgacatgtgatgcgttggatgtgttatttagtcgttcttttgcttagtgtgaactctgctttcgcaaagtcaccagagcaagttaagtctgcatttttatatcagattgccaagttcaccaagtttgatgatcaagtagatcctccccctgttacattttgtttttacgatttagaaaatggtccgggctcgtatcttaaagagaaaaatgaactgcaaattaacaaaaaaccaatcaaagtaattttagtgaaaaaaactcagcaaatttctgaactttctcaagtttgtgatatcacatacattgatgaaacattagaaaatgatatacttccactttggaccgatacaatttcattaaatactttaacaataggcgaaagtattagttttttagaaaatggcggtatagcctctctggttcaagaaggaaataaaatccgactgtatatcaataagcagcacgtattgcagcataactttaaagtgcaatctcgattgttagctatggctaagttttatccaaattgattttacttgttaacaattggatctaatcctataatctctagtattcggttttgcttgataataccgaatttttgtaaataaaatttccgaaaaggttaatatacaatgcaaacgccagtcattctgatcgtagaggatgaagacgtaactcgactaaacctcgttagtttatttgaagctgaaggttacaaagttattgaagccattgatggcgatgatatgcatgacaagcttacaaataatgatgatgtgaaccttgtagttatggacatcaacctaccaggtaaaaacgggctaatcttagcgcgtgaacttcgtcaaaaacgaaacgtgggtttaattttcttaacaggtcgtgacaacgacgttgatcgcattttaggtctagaaattggtgctgatgattacatcacaaaaccatttaacccgcgcgagctaactatccgtgctcgtaacctaatttcgcgcacagctttaggcggcgaagaagcaaatatcgaaacaaacggtgttattacatttaacggttgggaacttgatgaaaacagccgttgtttaacatctccaagtggtgacgctaaacgtttacctaaaggtgaatatcgtgcgctacgcttaatgcttgactcaccgggccgtattttcagccgtgagcaattaatcaagcatatgactggccgtgagcttcgcgctaacgaccgtactgtagacgtaacaattcgtcgtatcagaaaacactttgaaagcgataacagcacatctgaactaatcagcaccatccatggtgaaggctatcgtttcatcggtaaaatcgacagctaattagaattaattttctagttgttgtaaaaataattggagggcttcgcgcccttcatttattttaactgctagttcatcaagccactgttgtaactcttcactactttcttcaagcgctccatgctccatcttcttagcgtgtaactgaacatcgtttaagcctacagagccagctgcgccttttaatttatgcgccaccgatttgtactcttctctatcatctgctgctaacgcatctgcaagctcagtttgatattgtgggtttagcttattaaacagctcacaactacggttgaagatagttaaccccattgaaccaacaaagtcttcaatggtttcaatatcaagtaactcaacgcggatacctgacaaatctttgactgacactggcttgattgtttctgactgacaacttttttgttgtttaatatcaaacagctcaccaagcattttatcaagcttggttgtattaattggcttcgcaagcgcgccttgaatgttaataccagcaagctcttcttcagcactacgcacgttagcagttaaggcaacgattggtaggttatcaaagtgctcatcgtcacgaatttggcgagcaacttcatcaccgttgatatctggcaattgcatatcaagtaatacgaggtctaagtcatcttctgtgtagacaaacgacagcgcatcttcaccggtttcagcccaaataacttcgtgaccacgctgctcaagtaaatttgtggcaatttcagcgttaagcggaacatcttcaacaagtagaatgtttaaactacgaaccgcataattttgctctgtaggcgcaatgcagagtttaagtgggatctctaccacaaaaacgctgccctcaccttctgtgctgcttacatgtatttcacctttcatcgcagtaaccagtgcttttgttactgcaagcccaatacctgagccaatagcattggtgccattgatgtctggtgctttgtagtacatgtcaaaaatacggtgtagttgttcttgcgggatcccctgaccggtatcactaacacgcatcactaaccaagggccatctgggcgattttcacgaatacattcaagctcaacatggccttgctgtgtaaacttaacggcattatttattaagttccacacaacttgacgtaaccgagttggatcaagcgatgcatacacatccaacgtgccttttcgtttgatgttaaaatcaagactcttttgttcagcaatcaggccagcaaagttaacaacatcattgataaagtcagctacatttactgagtcagtaacgatatctagctgctcacggtcaattttatctaaatcaataatatcgttaaaaatattaccaagggtttcagcactcgaaaacactgtgttacaccaactacgctgctgtttatcaagctcggtatcaagcaacatgcgtgttaagcctacaatgccattcaaaggcgttctaagttcatgactcaatgtggcaataaacttccctttgtctttataagctgcttcaagcgcttgtgcggcttctttacggctggtgatatcacgaccgaaagcgagcaaaccaatatattcccctttttcgttaataaacggtaacttacgcatctcaaaccagcgcttttcaccattaacgggatattcaacatcaagcgttagggcttggtgcgtttgcgatacttttttgtcggtgcgcagtacttcaggtaagtaattacttgggtagatttcctctacacttttgccaattaactcttcgccactttttccaatcacttgctcaaacattttattacagccagcaaagacgccgttgttatcacggtaataaaataaatcaggagaggagtcgacaattgagcgcaataacataccttgttgggcgagttcttgttgagttttcttgcgctcagcgatttcacgtctgagctcttcaattgctctgtgcttagcgtgaaacgccattttacgctcatcaatctcttcatttaagcgactgatattgtcttttaacgtttggtttaatagtttttcttgcttagtggcactatctaaatagctatatgatgcttcgagctggcgaattgaatttagcagcaccgaaatcaaaataggcgatacaactgcggtaaaaaacatcaccgctaaaacatccaccaaggtgacagtccccactgcaacataataaaacatgcaagataaaatcagcgacatcactaataataaggcatagcaagccgcagcggtcttaaattcaccgtatttagaaataaagcttgagagtgtgcgagcccacggactcatagaagaatcaatcatatattaaagcttaggcacataatcgaaaaaaacagcatagctaattttatcactaatcctttagaaatattcacattgtgcgataaacatataattttttcacgtatggcacttctttttatattttttcatgtaaaatatcgcgctttattaattgcaaagaatgagtattaccatgcaaaccacaatgccagatattgctgatacggccccagcgttaaaaacgggtaagttagactgggttggcatgggtgaaattgaactacctttcatttttgaaactcgtaaccaagccccagtaaatgtaattgctaaagcacgcgcctttgttaatttacataaagaagatgccaaaggcattcatatgtcgcgtttatttttggcgcttgataccttatcaaccgagcaacaagttaatccccaaacccttgctcaagcacttgatgcctttatcagtagtcatgatgacctaagtgacaaagcacagatcgagtttaaatttgagttgcctttgcgccgcaaatcactattaagtggtaaagtgggctggaaaaactaccctatccacttaatcgctaaaataaaccaaggtgtattaagctttgaattaatggttgatgtgacctactcgtcaacatgcccatgctcagcagcccttgcacgacaattaattcaaaatgcatttagcgaaaagtttgcagagcaagatattgataagcagactgttttagaatggctgggcacaacggatggaattgtggctacaccacactcacagcgctcaattgcaaacgtcaaagtaaagctcgacagcgaaattgatagttttgatgtggttggcttgattgatgctttagaagcagagcttaaaacgcctgtgcaagcagccgttaaacgtgaagacgagcaagagtttgcccgcttaaatggtcaaaacctaatgttctgcgaagacgctgcacgtaaaattaaaggcttactcgaagagcaaaattacgctgattactggctacaaataaatcactacgaatcacttcatgcccacgatgcagtggcaattgctgttaaaggaattgttggcggctacacagcttaaaaaattcaggtgactccgcacacttaggcacactaattgctaattattttgagtgtcaatttgttgttgtggagttaccatatggaattcgctttattatcaattttagttttagtcgtagtagcctctgttgttgcgtcaaagtttaccgatgaaggcggaaacccttatcctttcactcgtaagcaaactgtttttacgcaagttgagagtgcttttttacatcttctagaacgtgctgtaggcgaccaatataaaatcgtcagccgcgttaaactcattgatttaatcgactgcaagcaaggcttatctgtcaaagcaaaacgtgctgcgatggctaaagccaaaaacaaacagttagattacgtacttatcgacaaagacaaacttaccattgttgccgcggttgatttagtaaataacaccaaccgcgacggccataaagcacaacgtgattggtttgttagtggcgcattagaagcggcgggcatcccgcatattcgcatgaaggtaaaatcaggctatcaaccaagagaagtacgtgatgcaatcatgtttaaacttggtaaacctgcagcagcgcctgcaagacctgcacgcaaccgcattactaaacctgcggtattatcaccatcacaagcaaaagcacactcaacggcgcttgcagaaatataacctgtcataatattggcaaaagcagactttaaggtctgcttttttgtttgtttcgggcatttttaggtataatcatcctattcaatctaaggaatcaaatattatgcacgttggtattattggcgcgatggagccagaagtaaaaattttacgcgaagcaatggcaaacccaagcactatgactaaggctggctttacattttacactggtgaattagcgggtaataaagttactttagtacagtcaggtattggtaaagttgcatctgctgttgcaacaacactgcttatcgataattttagccctgattgtgtgatcaacacaggctctgcaggtggttttgagccatcattaaacgttggcgatgtagttatctcatcagaagtacgtcatcatgacgtagacgttactgcatttggctacgaaatcggtcaggtgccacaaatgccagcaggctttgctgcacaccctaaactgattgaagcggctgagcaaagcgtaagtcaaattagtgatgttaagaccatgattggtctaatctgtacaggtgactcattcatgtgtgacccagtacgaattgaaaaaactcgcgctgaattcccaactatgcttgcagtagaaatggaaggcgcagcaattgcacaggcttgccacgtattagaaacaccatttgttgttattcgttcaatgtctgacatagcaggcaaagaatcaccgcaatcatttgaagagtatatcgaaactgcatctatcaactcatcaaaaatggttgttgctcttttagagaagctgacgtcggtgagtttataaggtgattacaaatattgttcaaaaccatttggacattattgtattttttgtagcgctcattgctgagcgcttttttcctttggttagttggtatcatcctagtacctttttaagcgttattttttctgctcttggtgagcgtttatacagcccttctaaccccaaaagttatcagtatttagcatcaaccttggcattcaccttcactgtgttagttatagtgacactggttgtactttttttagaatttgctttttatcctgagctattaaacggcttaattttgtatttcttactaagtagtcgtgcccaagagaaaaaatcactgcggatagcaagattagttaagctaaatcaaaaagcgacagcaagagagctacttacaagccttgttgctcgtgatgtttcacgtttatcggctcctggaatttgtaaagccaccatggagtcactggtgctgcaaagtgcgcggcattattttgccgttattttcttttatataattggcggcgctatctttgctttggtttatcgcttactcactttaatacatcaagcatggcgtaagaatcgtaagccaaataacccgtttttaactaccatagctaaactactgtttgtattagagtggttacccattcgattattggctttaacgattgctgcaagcaattccagcaagcagagtattcattatattaagcactatggaagacacttttatcaaactaatacaggctggctattaagtgtgacctctgcggcattacaagtgcaattaggcggtccggcgctatatcaagaagagcgatttaataagatgcgtgtaggtaccgaccgtttaccaaatgctgatgatattgccgctttagtgaatcgtttaaaccaagctaaagcattttggttactactgatagtcgggattgaagtaattagcctattcacaaactaatcaaaatataagcacaaaaaaaccagccgtagctggttttttaatttctattagcttgattaagctagggtgattttagcaaacttacgcttacctacttggtaaatctgagtagtgccttttgcaacttcaagcttagtatccgttactttttcttcaccatttaatttaactgcaccttgcttgatcatacgcatcgcttctgaggtacttgcaacaagattagcttcttttagtaagttagttataaacactgtgtcttcagcgatagtaactgtcacttcagggatctcatctggtaatgcattcttttggaaacgcttgatgaaatcttgatgagcaccttcggctgcttcttcactgtggaaacgtgcaatcagttcttttgctaattcaatcttgatgtcgcgcgggtttgcaccatcagcaacacgctgcttaagagctgcaatttcttcgattgataatgcacttaataagtcatagtaacgccacattagctcatcgctaatagacatcactttaccaaacatatcgttcggctcatcagtaataccaatatagttacctaatgacttagacatcttttgaacgccatcggtaccttcaagcagtggcatcataagcactgtttgtggcttttggccttcgtctttttgtagttcacgacccattagtaagttaaagcgttggtctgtaccgccaagctcaacatcagcttctaatgcaactgagtcccaaccttgtaccagtggatataaaaattcgtggatagcaattgattgaccattggcataacgctttttaaagtcatcacgttctagcatacgtgctactgtttgacgcgcagccagtttaatcatacctgcagcacctaagttctccatccaagtagagttaaatgcaacagttgttttagcaggatcgaggatcttaaatacttgctctttatatgtttcagcgttggctaaaacatcttcacgagttaacggtttacgtgtcacgtttttacccgttggatcaccaatcataccggtgaaatcaccgattaagaaaatcacttcgtgacctaagtcttggaaggttttcattttgttgataagaactgtatgacctaaatgcagatcaggcgcagttggatcgaaacccgctttgatcttaagtttcttacctgactttagtttttcaactaattcgtcttcaattaatatctcttctgcaccgcgttttatctcagctagagcggtttgtaaatccactgtgtattactccaaaaattcagctaccggggcgtggtggcctgtcagggttataattatagagctaaaaactttaaaatttagctagttagcatcaaaagagtgacactaaaaaaagcctaacttaaatagtttaagaaacagccctgcaggcagcgcgcatgattgttctttataccgcgttattgcattttattgaaggtactttagttaactaacagcaaattagtttaactgacgacacatgctgcaaattcaaccaaaaaagtttaacgcgcaggccaattctagcgcaaattagcgccagtttaaatctacaaaacactggtatttgcgctattttaggtatatcctgcaatattagtaattaattttcttgacagcagaaaaggcacgttatggttcatgtagtgcacaaactccccaaaaaacacaaactgctcattctaggtttggtttctgctattgccggcttggcacttttgccttctgaaaaagccaccgcctcaaaggataacagtgcaaacgcacttgaaattggtaaacgctacgaattacaagttaaagttgatgataacgaaaaactaactgaactaaattcggagcaagcagcagcaaaacttccagaatacgagcttgttgatcatgaagttcgcaatggcgataatttagctcttatttttaagcgcgcgggcttctcagcgcaaactctgcacaaactagttaacacaaacgctgaaacgcgcaagttaacaaaaattcatccgggtgaaattttaagttttgcaaccgccgaagatggctcattagcgcagcttcgttatgtaatttcaaaaacagataccttatacgttacattaaatgacgaaggtaactacgatacatcaatcgacagcaaagaaattgaaaccatcagcaagtctgccggtggtgaaatcagcaacagcttctggacatcgggtattgccgctggtttaagcgagcgtcaaataatgaactttgccgatatttttggttgggatgtcgactttgcaaatgatattcgtaaaggtgaccaattcggtctaatctacgaaacccactatgttgatggtgaatacatcggtgatggcaaaatcattgcagcagaatttataaaccaaggtgaacgttatacagcgattcgccatactgatggtaacttctatacgcctgaaggccgtagtatgaaaaaagctttcttacgcgcgcctgttaactttaagtatattagctcaagcttcaaccctcgccgtttacaccctgtaactaaaactgttaagccgcataatggtattgattatgctgctcgcacaggtacaccggtagtttcatcaggtaatggtaaagtgattaaagcgggttacagcaaatacaatggtaactacgtatttattagccacggcactcaatatgtaactaaataccttcacttgaacaaacgtctggtaaaaacaggtcaaaaagtgaagcagggtcaaaaaattggtacggttggtgcgactggccgtgtaactggcccacacttacactatgaattcttagtaaacggtgtacaccgtaatccgaaaacggtcaaactacctaaatcagagcctttaccgcgtgatgagctagctaagtttaaaccgattgctgataacttcttagcgcaattacaacgtaaccgtgagttacaattagcgttaaataagtaattgagtaaacattaaaaaagccgcacaatgatgaagcggctttttagtgcctgccacaaaatcagccttaatgacctttattctcttcaataattgaaagcaagtatgagcttgcgcaggcgcgattcatgcctgaaataaaacacaacacagaagctattatcaccttaataaaacataaataagttgaataattagcgaaatcatcaccagtggccaaatgtactttgcgtattttgtcgcaccatcaagccccattttagactgatacttttcaagtagcggtattagaataaccaaggcaacaaaaaggcatagtaagataataaagatattcatggtggcttccttacacaactatcatttaactacaatttctttagggtgaccctagtctataggcaaaaaaaagcgcagtaaaattactgcgccagtcggttggaagtaaatcgacttagccaacaatcgctaacaaaatacctgctgcaacggcacttcctaatacccctgcaacgtttggtcccatagcatgcattaacaagaagttatgcggattgctttcaagacctactttattcaccacacgtgctgccattggtaccgctgaaacacctgcagcgcctactaatgggtttattggcgatttagagatcttattaagaccttttgccataaacacccctgaagctgtaccaatcgcaaacgctaatgcacctaacaccaaaataccgatagtttctacagttaagaacttatcagcagcaagctttgaacctaccgctaagcctaagaaaatcgtggtaatattgatgatttcattttgtgcactgttacttaaacgatcgaccacacccgattcgcgcatcaagttacctaagcagaacatacctacaagcggtgttgcagctggtaaaaacaagatagttaaactaagcaccattaaaggaaaaataatcttctcttttttcgatacagtacgaagttgtggcatttgaatttcgcgttctgcttgcgttgttagtgcacgcataattggtggctgaataattggcactagtgccatatatgaataagccgctactgcaatagccccaagtaagtctggtgccaatttagatgctaagaaaatagccgttggaccatccgcaccaccaataatggcaattgccgatgcatcttgtagcgtaaattcaaagccaggaataaagttaagtagaattgcaccaaataaagtagcaaaaataccaaactgcgcagctgcacctaacagcaacatacgcggatttgctatcaaggcactaaagtctgtcagcgcgccaacccccatgaagatcagaagtggaaacaccccagaatcaatccctatgtgatacacataataaagcagtccacccggttcagataagcctgcagcaggaatattcgttaagatcgccccaaagcctattggtaacaatagcaagggttcaaaattacgagcaattgctagatataacaataagcaaccaaccgcaatcatgatcaaggcaggaaaggtaaagttagcgatacctgttgcatgccagagatttaaaagaccatccattctctgtctcctacgccagtgcgattaatgcatcgccagtggcaacagaatcaccttcggcaactaaaacttcagcaaccgtgccggtatgtgcagcgcgaatttcagtttccattttcatcgcttccataatgatgactacatcaccttgatttactgtttggcctggctttactttcactttgaaaatattacccgccaatggcgcgtttaaagtttcgccagcagacgctgaagctgactgaggaattaactcactgtcttttaaagtcacctctttaagctcaccaccttgcgctacaacgacatcgtaaactttgccatcaactttaacgctgtattgctcagcttttactgagtttgcagcagctggtttgctttctggcttagcaacttcacctgtaggaatagcttcaaatgcatcaggattatttcggtttttaataaacttaagaccaatttgtggaaataatgcataggtgagcacatcatcaatcacatcatcagcaagctctaaaccttgctctttagcttcttttaataattcagcttctagcttctcaagttcaggttcaagtttatctgcaggacgacaagtaattgcttctgcgccatctagaacacgttcttgtagctctttattcataggtgccggcgttgcaccgtactcacctttaagtacacctgcggtttctttggtaatcgttttatagcgctcaccagtcaatacattaagtaccgcttgcgtaccgacaatttgagacgttggagtaaccagtggaatatagcctaagtcttcacgaacacgtgggatctcaagcaatacttgatcaagcttatcggcagcaccttgctctttaagctggttttccatgttagttaacataccacctggcacttgtgctaataagatacggccatcaacaccttttaggctaccttcaaaagcagcatattttttacgaacatcacggaagtacgcggcaatttcttctagttggtttaaatctaggccggtatctcgctctgtgccttcaacaatcgacacgattgtttctgtggcgctatgaccataagtcatactcatagaggaaattgcggtatcaagcatatcgatacctgcatctatagctttttggtaagttgcagtacttaatcctgtcgtcgcgtgacattgcatcgcgataggaatagagacggtttcttttaaacctttgattaactgctcacaatcatatggcttcaataaaccagccatatctttaatacaaatagaatgacagcctagttcttcgagctgtttcgcaagtttaagccacatatcaagtgtgtgtactgggcttacggtgtacgaaatagtaccttgagcgtgtgcgcctactttaaccgctgctttaattgcagtttcaagattacgtacatcgttcatagcatcgaaaattcggaacacatctacaccatttttatgggctcgttctacaaacttttcgacaacatcgtctgcataatggcggtagcctaaaaggttttgtccgcgcaatagcatttgctgtttagtatttggcattgccgcttttaattcgcgaatacgttgccaaggatcttcacctaaataacggatacatgagtcaaaggttgctccaccccatgattcaatagaccaataacctgcattatcaagtttttcagccatgggtagcatgtcgtctaaacgcatacgcgtggccaataaagactgatgagcgtcacgcaatactaattctgtaagttttaatttagccatgtttaagctgccccattatttttgtttatttcgaaattgtgcaattgcagcgctgatcgcggcaatatgtgcctgaggcacaccctgttgaggttgaatttttgctgttcgtgttggctctacacttgtaggatcatcgaatcggcttacaactttcgacattaaaataaccgcagatattaaaatgctcagaaaaacaaacacgccaaccatgcctgttaccattaagctgcctgcagttgtgagcaattcaccaatatccatacaactccccttcgatgattaaaaataaaaaatcatttttgttaaatatttattcagcaataataacaaacaaaaataatttgtatagcctattgtaaattggtaaaaccaattaaactcaaaataacatggagcacaactaattaacaccatactatttcagcaattaaccttacgttatagatgataaaaataatgaatatagccatcagttatattaaaacaaaccgacgaaaagcaagttctgttcaaaaaccctgcttaacaaggtgttacagtaacaactcatgacaaagtgtgaaattggtcttaccaataaagacaaaactaaatataaaatgaatttaattaatatgaaaaaatatcactatgaataagttacacgcttgatcgtaaaagttaccaaaagaataaccatgccccgcccacaaaaaccgctaaacaactgaaatataaagataataatgattggcataaaactcgctttattcaactcgaccatttgaaaaattaattaggcaaggagaccactatgttacgctggaccattacttttttagttattgcattaatcgctgcagtgttaggttttggcggtattgctggagccgcagcaggcattgctaagattatctttttcatttttttagtattgcttgttatttcgttagtgtcaggtgctcttagaggcaacgtacctaagtaaagcaagttaaaatttaattaaccctaatatttaatttacaaggaatttagttatgaaaaattcaactttaaaagccgctactatcgccctattttcaggtttattcattatgggttgtgaagacaactcagcagaggaagccggtgagcgtatagatgaagcaatcactgatacacaaaatgcagttgaagatgcatgtgaagaagttaaagaaggtgttaaagcagaagaaactaactgctaatatcacaccttacgaaaaaagcggcctagtgccgcttttttgtgtatgcaagttagcaactttaggttgcctactgcttgtgtcaagaaactcgctaacttgttgggtttcactccgttctaacctatgtcatattggtcgtcatttatggcgacacatgttttatcactcatacataacgggctaaagcccgacttacagccgcattaattgagaaaatcgcgcgaaataaatttcacgcctacgcgagcctcaagttagcaactttactctttcccatagaaactcgctaacttgtgggtttcactccgctctagcctacgtcacgtaggtcgtcatttatggcgacacatgttttatcactcatacataacgggctaaagcccgacttaaagctgcattaattgagaaaatcgcgcgaaataaatttcacgcctacgcgagcctcaagttagcaactttactctttcccatagaaactcgctaacttgtgggtttcactccgctctaacctacgtcacgtaggtcgtcatttatggcgacacatgcttaatcactgatatagtgacgggctgaagcccgacctacgacttacacgtagatttaagaaacatcgcgcgaaataaattccacgcctacgtgagcctcaaactcgctaacttgttgggttttaatctgatagctgacggctgaaagctgatggctctgagtgcgtctccgttctacccaacgttatcactcacattccttagtgaggagcacgtttgtcgttacactcgctatatgccactgaccgtcgataaaactcacttttgcgacgtcacttacggcaaaatcaccggggacatttaagcgcgttaagttactcgctaactgttgtgtacagtatggccctgtatcaccatgcatcacgagcactggcttattggtatgctttgcaaaatcgctgatggcatctcggtatactttaaaagcatcacaatcggcgcgctgtgactcactgcaagcggatttactggttgggtggtaaatatctgcctgaaagccaaacacataggccttagcatcctgatgaacatgtgcttgctttagccaaacgagattgtatttatcacgcatatcggcggcatccagtgctgcgtttttatcactttttaagatttgcgagcgaccattaaaggtgcccgggatatgcaaggtacgaaactcaatgccattaaattgccatcgggcattttctggcatctcagcttgtgtcgcataaccctgtagccgctttgctttttgtgtataggcatcgtcgaacattaagcgtttgataaaacttagccgttcaagctcatcaaaacgcaccgatagtttttctcggtcgcaatcggtccattcattatcacctggggtgtaaatgaaaggctgtgtagtcagcgatgttaataacgacttattgctttgcagaagcttattcgtacaagctagtgctcccgatttcatatcgcccaagtgcatcaaaaattcatgaggtgtcgctgcgattgccttggcaatttttccgccttctgcgagattaatttcatctatcggggtgtatggcatatcgcccataaccaaaaaagtatttgtagtcattgcaagtgctaacgacattgaactaacaaacatatagcttacacctttaaaatacacataccttaagctctcacaatgacaactaaatgaaaaccaactgcggcagattttttttatcaatgttaaactgctatcagcaaattaagtgagcccacgaatgacattaactacaacttacacattagataaaccgtattactacgagtgctttgatgagtctttaccctactcatctcaggctaaacctaaatatcctctgttagcattgctcataacattaggcctactagccttttaccagttagaaaaccattatttaggtagttttatgataatgcttgccgtagtggagtgcttatcgttttattataaacgtccatggtgggtggccagacaaatgatgagtcgtgcttcaggtagtgaagtaactatcgtgtttgatgatgaaggtgttaaagccgaaaacccctataaacactatcaactaacatggcaacaaatcacagacataattgagactgagcgaggctatattttgaaagctagtcgaggtatgcaatacctgtctaaaaaagcgctaaatgaagagattgttgcagaactaaataaaagagccactcaatgagtggctcttaaaatatctttcgctgattaaacgttgcccggatttgggttagatttctctgcttggatgcgcatgtagatttcttcacgatgtactgatacatctttaggcgcattaacaccaatgcgaacttgatttcctttaacaccaagaacagtaactgtaacttcgtcaccgatcataagggtttcacctactctacgagttagtattagcattctcttgctcccatattccaaaaaattaaaagattccgcgtcaaaaacattctaatgaaatctagacttaaaagtaagtaaaaactctaaatcttattcattttcagttaaaaaaactttgtgcagcgcacgtactgccagctctaaatatttttcgtctattagaactgaaatcttaatttcagatgtcgacaccaaaatgactttgatgttttcttcggcaagcgcattaaaaaataaacttgctactccagagtgtgacttcatccccactcctactgctgacaccttagcaacattgcttattcctttaatagaatctgcgccaagcgcagcctgatttaaggttaaaacttccaatgcttgttcataatcattggtgtgcacagtaaaagcatagtctattttttcaaagttatgattaacttgattaatcatatcaatttcgataccaaactctgcaaaaagtttcgtaattttagccaggttttcaatcccatattgcatttgattgatataaatcaaactttcatcacgattgaaagcaatacctgacacaatatttgcttgcacttccggttcctcaaaactgatcaaggtcccttgatctgggttaaaactcgatagtactctgagcggtatattgtattttcctgccgcttctacactacgaatatgcaataccttagcacctaaactcgccatttcgagcatttcttcgaaagtaacatggctcattcgacgagcatttggttcaatacgcggatcagttgtatatacgccatcaacatcggtatagatctgacattcgtcagcattaatcgctcccgcaatctcaactgctgaagtatcagtaccacctcggccaagtgtggtgatattaccttcaatatctcggccctgaaagcctgcgattatagcaatacggttgtgctcaagctcatgctttaaacgagtcgctgcaacctcttcaatacgcgctttaccaaacatattgtcggtgcgaatgttgacctgatcagccagcaaacttaccgctgagtggccacgtttaatgatagccattgccagtaaagaaacagacacttgctcacctgtggtaagcagtacatcaagctcacgggcgcttggtcgagaatcgatttgtttagcgagttgaataagacggttagtttctcccgacatagccgagagcaccaccacaacttgatggccttgctgcttggtttttacaacaaggtcggcgacggcctcaattcgctcgattgagccaactgaggtgccaccgaatttttggacgataagtgccactagtagttaagaacgctcagataaccaaccagttacactttctaaggctgtagctaggttctctggctgagtaccaccagcttgtgccatatcaggacgaccaccgcccttaccgcctacttgtgcagccatgtggtttacaagctcaccggctttcactttacctgttaggtctttagttacacctgcaattaggcttactttatcgccattagctacaccaagggcgataacacctgaaccaatcttcgttttcaggtcatcaaccatgccacgtagtgctttagactcagtacctgcaacatcagcaaccagtagtttaataccgttcacttcaacaacagagtcaattaacgatgcaccagccgcacttgctagcttgtcgttaagctgtgcaatttgcttctcaaggccttttgatttctcaagtaacgccgttactttttcaagtactgtgctgctatcacctttaactagtgctgcaacatcgtttagttgttgctcttgctcacttacataagcaaccgcttcagcacctgttaccgcttcaatacggcggataccggcagcgataccgctttctgatacgattttaaataaaccgatatcacctgcacgcttaacgtgagtaccaccacataactcgattgagtaatcaccaatggttactacgcgaacttcgtcgtcgtatttttcaccgaataatgccattgcaccttttgcttttgcatcttcgatagccattagctcagtttcaagcgcaaagttacgacggatttcatcgtttactgcgcgctcgatttgacgtaattcgtcttttgtaactgcttcaaagtgtgagaagtcaaaacgtaaacgctctgggtcaacaagtgaacctttttgatttacgtgctcacctaaaatttgacgtaacgtttcatgtaaaatgtgtgttgcagtgtgatttttcttgatgctatcgcgacgtgctgcatcaatggttgcctctgctttatcgtttgtaccaatgcgaccttgcacacgaccatggtgcgcaaatgcattaccaagcttagtggtgttagtaacgacaaactcaccgccagcaacttttaacacaccggtatcaccaacctgaccacctgattcagcatagaacggtgtgcggtcaaggattgcgataccttcttgaccatcttcaagtacagaaacagattgaccttcatggaaaagctcaaccacagtacctgtgtaatgctctgcatcgtaacctttaaagtctgtgtgtttttcagacttaagttgttggttgtaatcagcaccaaacttaccagcttgctgtgcttgcttacgttgcactgccatgcactcttggaaaccgtgctcatcaatggtcataaaacgctcacgcgccacgtctgccgttaaatcagcagggaaaccataagtgtcgtaaagcttgaatactaaatcacccgggatcacatcacctttgatgtctgctaggctttcttcaagaattgccagaccacgctcaagtgttttaccaaactgctcttcttcaatacgtagtactttttcgataatttcttgttgcttagcaagctctgggtacgcttgacccatttgctcaattaacgcagcaactagcttatagaagaatgcgcctttcgcgcctaacttgttaccgtgacgaaccgcacgacgaataatacgacgtagtacataaccacggccttcattagatggcataacgccgtcagatactaagaatgcacatgaacgaatgtggtcagccacaacgcgtaacgatttatcatctaagtcttgtgcattcgttactttagccgcagctgcaatgagtgcttggaataaatcgatttcgtagtttgagtgcacgccttgtaaaattgcagagatacgctcaagacccatacctgtatcaacagactgcttaggaagcggctccattgtaccgtcggcatggcggttaaactgcatgaatactaggttccagatctcaatgaaacggtcaccgtcttcttctggtgaacccggaggaccaccccaaatgtgctcaccgtgatcgtaaaatatttcagaacatggaccacacggacccgtatcgcccattgaccagaagttatcgctagttgcaatgcgaataatgcggtcttcactcaggcctacttctttatgccaaatgttgaaagcatcttcgtcatcgtgataaatggtaacgagtagcttttcttgcggaagttttacaacttcagttaaaaattcccaagcaaacttaattgcgtcttgcttgaaataatcaccaaagctgaagttacctaacatttcaaagaatgtatggtgacgtgcagtgtaacctacgttttcaaggtcgttatgtttaccaccggcacgcacacaacgttgtgagctggttgcacgtgaataagggcggctttccgcacctaaaaatacatctttaaattgcaccataccggcattattgaataataacgtggcatcgttacccgggatcagcgagcttgaaggaacaatttggtgttgtttagaggcaaaaaagtctaagaactgttgcctgatctgtgcggtagtcatatgctgcatgtgaaaatctcacccgtttattgctgtgcttgcattgcaaaatcaatttgttcgtaattaaagcctcgatacatcaagtagcgaacacgtttcgctttttctttctggtcgagttctttacctgaatttgaaaacttctttaaatatgcgtcctgtgcgagttcaaaccaatcgatttcgaactcttcgagcgtcttatctaataatgctcggtctatcccttttgccatcgcttcgctctgaatgcgttttgcaccatgatactttgctaaatggcggcgtacaaacccttcacaatagcgctgctcgttaataaagttgtgtgactcacaccaatctaacaaacgctctgtgaactctggcgtcgcctctttttgctgtaactttcgggttagatcccgacgcgaataatcttgtcgagatagtaaccaaagtacgtaattctttaacttttgttctttatcatccattacgcgtcaaaacgtcctgattgcgacggtgattcaggcgcattagcttggtcatcactttttggtacaaccggcataaaaatagcctgaaatgacacgaagaaactaatgtaacaaattggcattaaaaccaatagaggaataaacgataaaggaatacagatcaccattaacacggcacaaataaggccatacacactcagtggtgccatatttttataaaataccataaaagagttttttaacaccgcaaacatgttgctttgcttttgaaagtagaccaaaggtactgcgtaggcaaaagccgttaaatacacacagatagccaataaaaataccgcaacttgccccatagaaatggtcgctaataaatcagccaaatgagcttgattttgagggtcaaaagtctgactcgagataaccgcgtaagcatctgcaaagataaaattagacagtaatgccaataaaatacctgccgccatctgatacaccgcgactcgcactaaaccaatacggtttcctttgttgctaaatggcttaaaaatatcagcttggctgatagtcccaccttgttgttttgtgagcacagcttgataaaaccccgccattaaaaacggcgtcacaaacgcaccaacaacttgcaatagaggcagtactagcgccaaaaagctaattaccactattagcagatgcattaagataaaagtaaacggttgcagcttaaagatttcccagcctgctttaaaccactttacgcctgcaccagctttaaaaacacgaacttcgattgacataatttctcattcaataacgacaaaacgcaccgagtataactgggtgcgctacttgtttatagtcacctgttgtgaaatttattcaggctttttaatttttttaatatcaagcatgtgcgaaccatgtttgattttcgtttcgaggtaagcacgattgcctactacacctgctttaatatgagcgtgcgtgcccacaacagagtcaacctcaatgcctgcatcacgcagtgctttaagtttatttgggttattggtcattaacttaacgtgcttttgcccaagagcctctaacattaaaaccgcatctgaaaagtcacgtaaatcatcagcaaaacccaagtggttattcgcctcgtaagtattcatgccttgtgactgcaatacgtaagcatcaatcttattgtataaaccaatgccacggccctcttggcgtaagtacagtaaaatgccgccttgctgatgcatcatttcgatacactcatttaattgttcaccacaatcgcaacgtgacgagtgaaatacatcgccagttaaacactctgaatgcatgcgaattaatggcacatcttgctcagagtcggcttgattaaatactaatgccacatgctcttgaccatcttttaaaccactaaaagatacgatttctgcaggaatatcactgtttttgccaacatttagctggactcttgctcttacttgcgccacgacaaatccaaaattaaaaaataaatgcgatactgcaaatgtgattacaacagcttgaaggttgtaagaatgcaacatacgacgagtgataactaatattgaggcagttaccagcaattcaagtattatacactcaaaccacttgaagatacgagctttgcgctatgaaagccggggtttttactgcaacaaataatctaaaaacataaacacaaagcaagcattgatgcatctaaagcgatttgataccttgtacctagttatgataaccattatcattaacttgtatcagttatcatccaaaaactgggcagagataataaggattattatgaaaaagagctcacttgccttatgcattgcattactatttagtcagcaaggcattgccaatgaaacgaccgcacaagaatttaacgacacctatcgcgcttatgtcgccgctgtagaaaaccaacaagacagcagcgaacttgcgaaaaaagcatttgagttaggtaaagaggtttatggcgaaagcgccgacaacaccgcaaaccttgccattaactatgcaaacagcctcgctaaaagcgaacaagatcagcgctttgagttatatcgtacagcctacgaaatactcgaaaaaaaacacggcaagctaagtgtgcaagtgtatgactcattaatcggcatggcagaatccaccccttcagctaagcgtgctgatacgtatttagatgacgctattgccatagctgaaaagcaaaattcagccaaacttgttgctgacacaaaattgactgcggcacgtatccttgcttataaaattaatagtgaacgctattacacagcaaaggagtatcttgaagaagccgataaatactaccaagaaaacttacctgataacgctgtcgatcgtattagcgctgacttcttagttgccgcatttgcagaaagccaacgtaaatacagcacagccattgaacgtttaaatcatgtagtaagcgtgtttgataaagagctagactttgatcacaaaacggaactcgatgcccattccaagctggttcacttatacgaaaaaacaggtaaaagtgacgaagcaaccaaacattgtatagcgattgcgaaaatggtgccttggaaagaaagccaagaacaagagccgttataccgtgtgccacctaaatacccaatgtcaaaagctcaacgtatggaagatggcagtgtcgtgatggaatttgaagtaaccccgtcgggctttgtagacaacataactgtggttgattctgaaggtggtactgcgtttgaaagagaagcggttaaagcaatgaaaaaatggcgttatgcgcctaagtttgaaaacggtcaagctattgctgcgacttctcgggtgcaattagattttaaaatcaactaataaataacagggtcgcaatgcgaccctttttataacctgcttaacaagttatctgctgcatcctcaattaaatcgagaaccttttcgaagccttgatcgccaccataatagggatcagggatttcgctctgccctgcatcaccatgacttaaaaacagcgacaacttatattgtaagtgctctggacactgggcttgtaaatcagcaagattttgcttgtcggccgcaaggattaaatcaaactcataaaaatcagcttgagtcacaggtcgtgaatagatgcctttaaaactataaccgcgcttttcggctgctgcttttgaacgtgaatcaggtggattaccttggtggtaaccaatggtgccagcagaatcaactttaacattgacacccagcgccttggcacgactacgaagtaccgcttcagcagtaggtgagcggcaaatattgcccaagcaaacaatcaaaacctttttcattattcgtccttaaaattgctttaagattgactcatcataacgttctgcatcaagtgacagattgtatttttctgccacactatcaagctctgcctgcttaattgccaactcatccatggtaatggtgttgtcatcaagctgccataacaaacgcgaaccggcatagctgtaatgaattgctaataaagcatctgcattgccctcgcgccctgcagcttttaactttggcatttttcgagtaattttatttagcgcttttttaagctcccacacatagacaatttcagtcatgtaatcatggttgcggtatttattaagcacaaagcccaccagcaaactacacacaacaacacctaataggttccaatgaaaatggctaccgcttgggtcaggaaataacgctattaacgtttgtgaaatggctaaactgccaacggctaaagcaattacacaagcaataattacttggtttaaatgtttacggtaacgggctttatctatttgaataagtttcataacaacctaaaaaacttgtgaaaaataaaaagtgaaaaaaatttcaccccttttttatttgccagccgttttagctatgaaagcaattatccaaagaggaacggctatgcatactttaccactaaactcagcaagcttgaataacagcaatacagctttaaagacaaccgcagcaattattggtggcggtgtaatgacctttgcagcatttgcatttatgcagtacttaatttctgcggagcaaagagccgatgtaaaaacaggcccagatattacggttgaaatttatgaagtaccagaagattcaaaagtgcaagtaaagcaaacactgccgccaccaccagttgctaaaatgccaccaaaaacgccgccacgcccaacgagtgataatccagatacggttgtggtagcagatttaacaccaacgatgacattcgataacattggcgacacgcttagcaaaagcattaaccaaccaacgggagatgcaacgccaattgtacgcataaatcctaaatacccaccggttgcagcccgcgaggggattgaaggctgggtgcaaattagctttagcatttcaccgactggcgaagttatcgacccagttatcattgatgcagagcctaaacgggtatttgaccgcgaagcaattcgcgctattaaacgttggaaatatcgccctaaagttgttgaaggtgtggcacaattacaaacaaaccaaagcgttcaacttgattttaaaatagatggataacggcctatgctaatgagcatcaagacatggttatttgacaagccaaacactgattgtttggcgcagtatgccaaaacaggcgacaaccgttatcttaaccaactcgttgctcagtacgggaacgatctttatcactatctagtcacccaaagtgataaagatcttgctctcgatatatgccagcaaacttggttaaaagttattgataaacgcgacttttacaatgaacagaacaatccaaaagcgtggctatttcgtttagcacgtaatttgttgattgatgagtttcgtaagcagcaaaagttcgttgaattagaagacaaccaagttttttctgaaccaaaggatgcagaatatcactacgactatgaagcctttgataaagcactcatggctcttagctttgtacagcgagaagcactgaccctacagcaagaaggctttagtctcgaagatattgttgctattacacaaagtaacccagagaccattaaaactcggctgcgatatgcccgtcaaaacctgaaacaacaactaggaggccatcatgaagcgtaacgacgagcaactcgatgctgatttacaagcacattttcaaaagcgtaaaacacagcacagctttagcaccgaacaacttgcacaaatgcaaacgccacaagtaacacggcctaaaaaacaacgttttttgaaaatacaaatggccagtttatttgttgccctagcattatttggctttgttatgcttgaatataattatcgagaactaacaaacatttatgctgttgatctttctgattatcaatgggtagaagttcacgagctcgactctaaaggcagttatgtaagcaatctaaagcagcaaaagcaaatgctagatactaactaccaacaagcattagccaatcaccaagcccgcaccagcttcaccggccgtctagtcagtgttgataacgactggtatatcgccgactgcgagcaaaatgtactcgtacaaattaaacaatcgctacttgaagaattacaaaagcacggcaccctagatacccatattcaccaaggtgacctactggcacttgaccaaaacaagcaaggccaaatcatcgcactcaaacagctaacccacgaaacgaaaaagtgtgcatcttaataaaacgagttcgccagttagcaaggggaaagagtaaaggagtaccgtaggcatgaaatttatttcgcgcgatggcctcaatccaactcttgtaggtcgggcttaagcccgttaatgaaaagataatttgtcgccataaatgacgacctacatgacgttcggtagaacggagtgaaaacaaacaagttaattaaaccccgagtttactttatcggggtcaaatcagacggctgactactcccccgctccttacctcgcttttcctaccaataatcgcacattgttctaatgttaataacaatttaatgctgaaccagctaggctaataacatcgtgtttaaatattatggagttaccatgaaaaggtctttgtttaacaatttaatcattgcctcaattagcttatctagcttgcaagcttgtgctcagccagagcaaaaaattccactggatgccagtgcgaataactacaaactagaattagtaagcgaagggattcaaattccttggggtatggcttggcttaacgagcgagatttactcgttaccgacagacgtggtgagcttaggttaattcgtgatggtaaactcgttgagcaaacagttaaaggcacacctaaagtacatgatgaaggtcaagggggcttattagatatagagcttgatccgaactttgccgacaatggctggatttacttttcctactcgggctatgaaggtgatggtgagggttacaatacctcaattatgcgcgctcgctttaaagatatgactcttgtcgatcagcaattattatttgatggcgagccaaatattaaaacaacgaaacactatggttcgcgtattgagttcgacaaagaaggttacttgtatttctctattggcgaccgtggcaaaagagacgttcacccacaaagcctagactacgatgcaggcaaaattcaccgtatcaatagcgatgattctatccctaaatcaaacccgttttataaccataatacaactcacaaaagcatctattcgtatggacaccgtaacccacaaggtatggcgatgcatcctgaaacgggagttatatggagccatgaacacggccctcgtggcggtgatgaaatcaacatagttaaagcaggcgcgaattatggttggcctgagatcacctatgggatcaactacattggtacaaaaattaccgacgaaaccagccgcgaaggaatggaacaacctgattggtattgggtgccatcaatcgccccttctggaatggagtttatcaccagcgataaatacccacagtggcaaggtcaaattgccgtaggctcgatgaagtttggccaccttgtgttagtgaagctagatggtgacaaagtaacaggccacagcaaagtatttgaaggtgtaggtcgtgtacgtagcctcgccacccaccctaatggtgatctataccttggtgttgatggtgtagggatttataaagttgtacctaaatcgtagattgggtagagcgaagcgaaacccaacaagttagcgagttacaaggaaaaagagtaaaggagtaccgtaggcgtgaaatttatttcgcgcgatggtttctgtccacactcttgtaggtcggactttggtccgtaactgtttaagaattaaatgtgtcgcaataaataacgacctatgtttcaagcaataaaaaaccacagacttctgtggttttttgcttatagcttaaagcttacagctattacttataaaacaataatactcgtcactaggtaagcgataaaggttaacgcgccgccaaataaggcgtatggcatttgggtttttacgtgagttaataaatcacaccctgatgcaatagccgataccgcactggtatctgagattggcgagcagtgatcgccaaacacgccaccgcctaaaatagcagcaattactaatgaaggtggtaaacctaaagcttgaatgagcggtacaccaattggaataagaatcgcgaatgtgccccatgaggtaccagtggtaaatgaaattaccgcaccggttaaaaatagcactggcacaaccaagtaaataggtaagaaatcacccacaagaccagctacaaacacacccgtacctaggtcttttaagcttgcccctaaggtaagtgacagcaatacaattgctaccagtggtagcaactcacccatacctttaaagccaatatcaacaagcttatgatgagtaaagtcgcgagagctaatcattaaaaagtaagccacaacacaagctaaaatagttgcatacagcactgatttagaaccactgccactggcaatatcgccatcgccagtccagaacataaagccaaccatgctagctattaaggtaataagtggcacaagcatataacgcgctttagagccttttacttcttcagccagctcggtttcttgttgttcaaaattatcttcagcttgctttaatggcccatgtaccttatcaaaagtaatggtatagaacacgataagtaaagtgataatggcgtaaaagttataacctatactgccccaaagtactgataccgcagactcttccatttcgtagttgccaagtagaccaagcacgtatgcaccccagccatttaacaagattaagatacacacaggtgcgctggtactatcgataatataagcaaggcgtgctcggctcattttaaatttatcgaataaaccacgcgataaaatacccgaggttaatacacttaagttagattcaataaatactgcaatacctgagaacatggttaaataaccaacttggcgcttacttttggcaacccctttgttcatcagtaaattaacggtagcagcgacaccgccagattcacgaatgtaggcaagtaatgcacctattaagatactaaaaataaggatacggctattaccaggggaactggcgacttcaacaacacgctcaatggtattaatgaaagtgtaaaataagctattaccttcaccattgatagcaagtaaaaactcagacgacgcaaccgcgaccaataacgccatgatcacttctttgcgccaaaacacaattaagatagcaatcaagggtggtaaaattgaataccaagacataaaaacccttttaaattaagaacagcattttatttttattatgcgaaaactcgctaagcttaatggctttaccattaaactcaacttaattcgactagtgatttaatatactctcataaatcagtgagataatagagccatacttacccgtttcgaaacgtttaccgacaaactcgtaattttcttgcgaaccttcaataggtgtatgacgcgcattagttaatagcacaatagcaaggtcgtactcggggtcaatgacggtcacagtgccagtccaaccagtatgaccaaaagcacgcgggctggcgtaaggaccaaaatgccaagttcgcgcttgatgccccgctcgtcgccaccctaacccataggtttcatcacttgcttgagagtttgtgaattgctcaagtacttgtggcgtaaaaatttgcttattgtcataaccaccgccattgagtaatacctgcataagcactgacaaatcaccagcagtactaaaaagccctgcatgccccgctacgccacctaaggcataaaaggctttttcatcatgtacttcaccttgcagaacatcggttcgaacattttcaaattcaatgcgtccacctcgggtgttaccattaatctctgtggccgcaatttgtgaggttaaaaagcctttttgcaatggattataaaccgtatgtgttaaaccaagcggttgataaatttggctctcaacataagtatcaagcgccataccactgatgcgttcaaccagtacacctaacaacatataatcgatatcagaatataagtgttttacgttacgtccagccacgaagggaacgccagttaataacaggtttttagtacgcagactgttttgtgaaaaaaagcgctcaccaaatttattgtctttacgatgaaaatcaaccacggcaggataaccagcactatgggtaagtaagtcttttactaaacgctgctcacggccgctgcctctaaattctggtaggtaataaaacagcggtttttctacgtcgagctttccttcgctggcaagcttcattagcgcaaagttagtggcaaacatttttgagtttgaggctatatcaaacaaggtattgttttgcatagcttgtgggcttttgagctcactgccatcagcgtggtactttttagctgcgccgtaatggcttaatttaatcagtttgccatctttaacaacggcaagtaccgcgcccggaaagccctctttaatttcttgagtaattaattcatcaacggcactaaagcgcttttgactgctgtttttatcaagcgttggataaggaaagcgtaaggttaagcttgccccttcaggcaatacattctcaactttataggtgttgatgccattgtgagtacgtttagccaaactgtattgatatattttttcggcagttaaaggcgaagctatattgattttttcaccattaatataaatgtcggcgctggttgcgtcttggttttcaatgatgatctcaccgcgacctttataggcgacaaaggtgcctctgtcgttaacaagcgcgcgactgcttggatcaagagcaggaatacgggctatcacttgtgcattagccagtgtttttggctctggctcaaccgcttgctgttgctgctgatattctttaaataaccgctcaagctttttagggaagtatttatctaataaagcaaacaacacagcggcacttctggcatcactattcccacttacatgccaaggcaaaaagtgcatttgaaaagcacttaaggcatctaaagtttgcgaatcaagctgtcccgtagcaatcacctcatagccgtagctacgcagtgctttttgcattaactcaacagagggttttgatgcactaaataattgccaatatttatcaacagtgtcgctgtcgtaccacgcaccgatacccgctttataaagttggtaccaaggaaaacgcgggcccgggtcgttcttacggcttggcgcaatatctgaatggccgataacttgagttgggccaatatctgggtttcgcgccaagatatctttgctaagctcaatcaacaactcaatttgtttggcatcatagtctggaaaaatacacaatttgctggcatcgttttccattgctggctgactttgctcaggtatatgacaggttggtacattcacgatttcaataccaattgaatgatcatttaaatcttctcggccttgccaaaagctgcggccggcgtgccatgctctgtctttttcatcaaccagctgaataatttctaaatcgtcttttggataacttggatcgcctgattctggtaataaataatgtgaacttaagcccccttcatccactaacgcacgcatcgacttttcgtaatcaatggcggtgtaatgcattactaaaaactttacacggtgactgtaattagctgattgtgtgaaggtatattgatgactggcacagcttactaaaaaagcagcactactgagataacacagctgtttaagaaatttttttaaaggggtaaaactcataacagattcatacctgatgatttaagcgttgacgattctcagcaatacagtagcaacacccacttaacatgtaaaatattttatttactaaataaagaataaacagcatacattatcgctaagtctctaaaaatgcagctatctcaacaaataatcttgtatctattatggaataaaactatattattccatctaattaaagaaaaatattccaaacttaggtcaagtaaaacaaaaaataagtcgtggtatcaaagcaattacgtatcgcaacttaaggtgtgtagtacattactatgcaatgtgacttaagttaattaaacaaagtgagccctatgtctacttttgtaaaaattaaagctttacgccagtctttatcgagcagcgaagcaaagcttgctgatttcacactaaattcggcgaatgctattcgtaacttatcatccgttgagcttgcgaaagtggttggagtgagccagtcaagtgtggtgaagttttcacaaaaattaggttacaaaggctttcctgcttttaaacttgcggtgattgatgcgctcaatgacgaaacaagtgaaccaaaactacatggtaaaatcacccttaatgactcacttgaacaaatcgcagaaaaattattaagtagtaaactggctgtactcactgaaacaaagaatctcaacgaggccgtggcagtcgaaaaagcagtagagcttttaaagtcagcaaagcgcatactgatctgtggtttaggtggctcagcattagttgcaaaagacttctcttataaattacaaaaactcggcatgcctgcaatagccgagccagatggccacgcgcagcttgcatacgttgctaccttttcaaaaggtgacttggtgattgcgataagtgagtcaggtatgacccgcgaaattgctgaagtagttaaacaagcgaaaaagaatgacagctcagtgatctcagtcacaaagtttggcagtagccctgttgctgactctgctgatgtaaaactttactcagtggctgaaggtgagtctgtgcgtttatcgtcaattcttgcgcgaacagcacaagactttgttattgatattctgtttatcgctctcacccagtcaagtcgccaaggccgtaaactactggaacattctaatgaagttgtcggtgaatttaagaataactaatttcttaataaataacatttaagaacaaaaaagcagcctaggctgcttttttttatgattgaagcagactttttcctcttaccataaatcacatcttttactctttatctttgggattaacccactgagtatacagtcataatttcttacaaaaataactttctgataattgagccaccgctaaagcgagcgattgctgaactttacctaaaacaggttatatattttattcctaaaaaaaggtacgttaataaaaaaatattcttgaccatagtaaataacacctgtttaatatgtgggcaacataatattaaagttcataagtctcaactgggtaagcagtccaacaaagcatataaatataaggacgggaaacaatgaaacaacatgcatccacactcgcaattagctatatagccaaagcgacaagcaatgcacttcgtgcaaagaaaacagcctttaccggcgttgttatggccgcggctctagccagcgcaccagcctttgcaaatctaaccggtggtattaaaggtaaagtatcatcaccagcgacacagcagtcactggctgggatcacagtaactgcaaagagtaacgtgatgccaaaacctcgtaccgttgttacgcgtgaagatggtagttatgacttaccgcagttaaagcccggtacttatgaactgactttcaccgataaaaacggtgtaacgcaaaccatgactgtcgacgttttacttgagcaaacatcaagcttaaacgtcactatgggtggtgctaacgaaaacgttgaggttatcacggttaccggcagtaagttattccgcgaaggtaaatctgcactcactaactcattaggtgaagaagcaatcaatagcgtgccagttggtcaagattaccgtgacctattaaaacttgttccgggtgttgagctatctgaaaacgcaacccttggtccatcagcaggtggttcgggtgttgataactcgtacggctttgacggtgttgatgtttcactccctatgtttggtaacttagcatcagagccatcaacccatgacgttgcctacgttactatggatcgcggtggtgcaaaagccgttggctttaaccgttcaggtggcttctcaatcaataccgtatcaaaatcaggtactgacgaattccacggtaatgttgaatacaaagttcaacctaagagcttagtggcgactccaacaggtcaagaaagctatgagcttgataaaagctggttaacagcaagtttaggcggcccgcttattgaagacactttatacttctacacttcttattatcgccctgaagaaacacgtactaataaagatacagcctatggtgaagtaaaagactataaaaatgtccgagatgaatactttggtaagttaacttgggcacctactgacgatattttaattaatatttcacagcgtacctcagaaaaaaccatcgaaggtcgctctgttggcgcttacgaaactgacagtgtttctgcaggtgataaagccgatcaagatatctttaccttagatggttcgtggcttttaggtgatgcaacaactctttcattccaatacagtaaattagagatagagtctggtaccacacctgatacaaaactacctgtagtaccatcgttaacgggtcaacttgacttaagtaatctaactgaaatgggttacttcagtgtaccaagcttattagatgctgatgataactacacagcagagcaaattgctgcatacaatgcaggcgctgcaccactcattgcacaatacggttataccgaagatgggcaaatgcgaggtggcggcggtgttggtgcgtattaccaatacgataatatcgacttttaccgtgatagctttgagttaaatctagaacatgaatttagctggggcgatagttaccatacattacatttaggtggtgaatggaaagaaagtaaagaagttctgtctcgcctttcaaatggttggggtagaatttcttatgttggcggcctagatgaaagcttagaagaaggcagctctgcgccggttatttaccgtgctcgcgtgcaacaaatgagcttagtagcaggtggagatgcggtttctgctattaactcagaaatggaaacgctgaacttcgaaatcaacgacaccattgaagtaggtgattggacttacaatgtgggtgtgcttgtgagccgcgatacttggtatggtcaaggtcttaaatcagcatctggtactctctctggttatgagttagcaccaggcgaaaaatacgaaatgtatcaaacagattggacagatatgatccagcctcgtttaggtgtgaattggaattatgcagatcaagactctgtatttgctaacttctcaatgtataaccctgaagcaagctcattagcgcgtgcagcctcttgggaccgtaatacccgtgccgaaatcgaagttgaatttgatgaagcgggtaaagtaatttacgcagagccgcgtcaaggttcatctggtaaagtatttgctgatgatttaacgcctcgtcaaatcaaagagtttactcttggtaccactaaatatgtgggttctgatttagtattacgtgctcatgttcgtcaccgtaaggcgtcgcatttctgggaagatatgccaaataatgcgcgcttaactgactactctggtgttgatgctgaaggcgtgccacaacatatcgctgataaaggcttatacgtagataaccttgatgcgatccgtgatgaaattggcggttcatcatatgttattgccgaagtagatggtggcgaaacgaaatattgggaagcgagcatcgaagcggaatacctaggcgaaaacagctatatcaatgcttcttatgtttggagtcactactacggtaacttcgaccaagataacaccacagcaacaacagatgcgaataccttcattggttcatcgaactatggtgatggccgtggccgctacccttgggattacaaatacggcacattatcaggtgataagccgcataaagtaaaagtgtatggttactacactgtgccatgggatgcgaacatcggtgcatactttgtattccagtcgggtaaaccttgggaagcatgggatggttcaatctatggctactcaagtggtacagcacgttatggagaacctgcaggtagccgtcgtagccctagccattggcagcttgatttaaactacacccaagactttaagttctcaggtgacatggaactacaattccgtgctgatatcttcaacgtatttgaccgtcaaacaggttataacaataacccatatgtatcgtcagaaacctttggtgagtatcgtaattactacagcccacgtcgtgtgcagctgtcgtttaacttcaagttctaagttaatcaatcctgttgggggccgctattgcggcccttttttatgcctcaagaacagacttaaattgtacaaaatgcttttgctgcatctatattaaccgcttctttcataaagtagtcgagctgcacagtgcgaataatcgcttgcgactcgctgttacctgcacttgcctgccactgccaacttttaagcgactctcgcgacacatcgacaaacagcccttctgggaagctctcgacaaaacggatatcaatcgtattgccctgattatcaatagttataacaaagcgcgcacagcccgtctgtttggcaattaaagcagctttaggatagataggctttgttgcatgttttagtgtccacagctgctctgctgcgtttttattatcacgtagatcaagcgcatcggttgagttacttgttgaggtgttggggagttgtgagcagccagctagtaaagcgaaagcagcaatgcttaaactgaaataagtcttcatggtatatccttataaatcaagctcctgaatataacacagctttttatggatataaaaaaacgaggcaagcgcctcgttcttattttctagttacctagctattattgataaagcaaatacggagctcgctttcgtttaaaagtacttaagtcagcttgccagctttgcttaatttgctgctcagtttgacctgcttcaatggctaaacgcaatttatcagtacccgcaagtttatccatgaagccagcgcgttcaaaaaattcttgattattcgcagttagcttttgataggctgaaataaataaacttaaatctagaccatgaatatcagcatctcgtaaatcttgaccaaaaacttcaatctctttgaatttagggttcattgatgcgccttcaattgcacgaggggtaaaactaaactcccctagttttattggcgaatagcccacaacttgaaacggaaaatccgtaccacggccaatggtaataggcgttgcctcaaagaaacaaagtgatgggtacaactgaatcgattgagcattaggtaagttagggcttggttttaccggtaactcatagctcattgtgcgctcataattagcaacgggaaccactgttaaattaagtttatctgcattgtttatccatccctcacctttaatcatttgagccagttcagccactgtcataccatgtaaaacaggaatttcatgcataccaacaaacgaacgaaattgtggatcaaggataggcccatcaacataagcaatattcgggttaggtctgtctaatacgataaatgacttatcattctcagctgccgcttccatcatgtagtgcattgagctgatgtacgtgtaaaagcgcacaccaacatcttgaatatcaaatataatgacatcaagatcagcaagtacttcaggagttggctttttattactgccataaatagaaacaacatcaatgcctgtttttgcatcaacagtactttttacatgtgcgcctgcatcatgatcgccgcgaaagccatgctcaggtgcaaatattttacttaccttaactcccctatcgagcaataaatcaactaaatgctgaccattaatctctgaggtttgattaaccactaaaccaacgcgtttacctttaagggctggtatataagcgtcgtaatttgcagcaccaacttgcaatggcaaggtgttttcagagacttgttgtggagtctctttacagcctaacagtgataaacaactgataatcataacaactaaaaagcgcattattcctccaccgctttacgtaaaaaaccatcagctttcgatagaagctctttagcatcaactgccgattttcctgttagtacaattaaaatggctaatttggcactttgctctgcttgctttaacgcatcaactgcttgctgctgcgtacaatcagtcgcttgcatcacgatacgtatagcgcgggcatgcaacttttcattgctggcattcacatcgaccattaaatttttatacactttgcctgtacgtatcatgctggcggtacttaacatgtttaatacaagcttttgtgctgtgcccgatttcattcgagttgagcctgttacagcttcagctccgaccaccggacaaatgccaatttgtggtaaacacatgaccgctgaattaggattacaagtcacacctacagttacacaacctattgattttgcatattcaattgcagagcacacataaggtgtgcgcccactggcagctatgccgacaacaacgtcgcggctcgttaagttggcattttttaaatcttcaatagctaaggtcgtgctatcttcagcgccttcaacagcctttttaaaggccgtatcacctcctgcgataattccttgcacttgctgatcattcacactgtaagtaggagcacattcaaccgcatccaaaatacctaagcgaccgctggtgccagcaccaatgtaaatcaacctaccgccttgctgaaacgcttctacaatgtgatctaccgcagcacttatttgcggaataacaagttttactgccgcagccactttatgatcttcattattgattttagtgaggatctcagtagtgctgagcaagtcaatatccaaagtgtcagggttttgtccttctgagacaatgccatttaactcttcgagtaattcacgttgttgcttaaatacgtgctcagggctcattgggttgtccttcttcaataatgtcataataatgctttgccgctaaaattgaggcgccagttaaagaatctcccttacaaggagataggtcattttgtaaggcctgtggtaataatggttggctcaccttcgcaagaccacctattaaaattaccggtaaaggtgagttgcctctgcttttgctaattaactcaaccactgactgtgtgtgttctgccaaaacactttttgccaccttacattcatcttgtaagctaaacaccaacggactaaatgctgcgtaatctgcgggtttagcaagtttaagccaatcactaattgcttgacgagtacatcctagctgctcactcaagcgaatcgttaaagggctttttggtaaatcaaaactatctatatcgtttaataaatgctgtacagccataaggccaatgcgggcaccaccaccaaagtcatcaacagtgaacccccaccccccaaccaatttaatttgattttgagccgttaatcgcgccccgacagctcccgtgccaagagctacgacaacgcaaggagcacctaaatttgccccatacagtgaagtagtcgcatcacttgtaatctctaagtaagcaaattcgatttcataaataagcttgagcattactttgacttgctcagcaaggcttactgacgaaccaccagcaagccccataacggtaactatatcgctaggcttaacattgctttgttcgcacacctcgcgcgtcactttaacaatgttttcaactgctaaatcaagatcattcgacagtgatgcagagccagcctgagcgcgaaattgcttacccgttgccagctctttaagctcagctaccaccttagtgccaccgccatcgatggctaaaatatatgatggcgccatttatgccgttgcctcattgcttgcttttcctatacagcacactaatgtggcaagcaaggtgccaatacataattgccacgtaaaccctaagtaaaagcgcatagattcaggcagtaaccaatcaatcatgtaaggttgcatgaatagggtcaccataaatcctgtaattaaggcagctaatactgacccttcactgccacgcttggtaaataaagttgtaaagtacacccctaataaaccactgtaggaaaagaccattacgcttagagcaaattttaataatggcatatcgctatactgctgccagaaataacaaagaatagccattagcgctaaagcaagacttaccagcgccatacccacacgacctgctttaacaaagtgctgatcgctgactcgcttattggctttctctaaatatgggcgatataaatcttgcacgatgactgaagacatcgaactaagcccagagttcaaagtagaaatagcggctgcaataataccgacactcactaagcctttcactccggctggtacttcgtttaatacgtagtacataaagatagtgattttttcaccgttaaactcttgaacaaccgtttgtccagcttcgctattcattaatgctggttgctgataaacaatataaagcagcaaaccaataaagatgaaaatagccataaccgggatcaccattaccactgaaagtagtaaagctttactgccctctttcgggcttttacaggttaacaaacgttgtgtcatatcttgatcaagaccaaacgcggcaatatttaataacacaaaaccagttagaacagaggccatgttgaacacccctgacgggccaaagtctaaatcaaacttaaacagcgcgagttttgagtctgcccctgggcttggttcatttaaggttgcaataatggttgaaaaatcggctggaataacgctcagcaagctccaaataaccgcaatagccgcactcacatagacaatgctttgcaatacatcagaataaataacgctgcggatcccgcccaaaaaggtatacaacaaacctgctagtgccagcactagagtggctacaaccacactgtctgcatcgatatttccgtataaaatcatcgcaacagcaatcgctgccatatataaacgagcaccacttgcaaacactcggccaaataagtacatcaagccgctgcgtcgctttgctttaggaccaatgcgtttttctaataactcatagaccgtataaactttttgctgataaaactttggaattaagaatgcagaaacaataaacgccgcaataaaggcaccaatattggtagcaatataagaaaagtctccttggtagccttgatctggcccaccaataaaagtggcagctgactgagaagtagccagtacagatatcgcaaccatccacgttggcatgctatttccgcctagaaaaaaatcttggcttgagttagcacgtttgcgattaaaccaccaaccacttaacaacaaaattgctgcgtagcctgcgaatactagccaatcgagtaaagcgtaatttgcactcatttattatcctaacccaaaccttaatggaatatattattccattattatgacaaaattaaaatacttttattttattatttttagttacctaggctaggtaattgccactgactttgtttttgctgatattgcgctttggtcaggcttaccagtaatggctttttacgctcatcaagccaggctagtaatgtgtccatatcgctttcagtcatcgctgtacaacccgcagttggtttactaggtgctcgccacaaatgcataaagatacagctgcccgcgccattaatattgcttgggttatgcttaacaacaatgccttttttatagagattatcttggctataaatatctcggcgcatccactccgaagaatccttaaccgcctcttcaccaacaaccgccttatcaactagttggttataaaagggtgagcctttcacatcgatacaatagtcgttagcagtcattgcttgatagttaaggtttgtttgcagtgaatctaaataaccgaatgctgtacctaactcaaaaatgcccgcaggcgctttaccatcaccctcttgtttttgctgtccaggttgtgacggatgtagccctaccccccaagcaagccctgtgcggccaagcaccacagcatgttgctggccttgttgttgccagctacctgcatttttttcaaagcgatacaacgtggcatcaatagcatcactgtcattagcgaccaccaccacgagctgctgatgactgttatcaatgactggtttaggtgattctacgcttgcacaagcggttaaactcatagctgcaataagactgactagttttttcatgctggccatactccgtttgttattagttctagaccgtttattgactcaataccaaggccgggggcatccgataagttaatttgtggaccgttaaatacaaccccaccttgaaccgggtcgtattgaccaagcgcagggccgtcgaggtctattttgcttatttgttgcgctttggctgaagctaaatgcgctgcacctgccacagcaatactgccctctaacatacagccaatcatacactccgcttggtattgggcagtgatattagcaatctcaattgctcgacttaaaccgcccgttttcattagtttaatattgataatatcaactgcgccaagctctaaaagttgtattacttgcttaggtgaaaaggcgctttcatcggccatgatcggagtgttcactcgctcagtaatatatttgagcccttgaatatcactgctttttactggctgctcaaccaactctaacaccacacctgcttgctcaagttgttgcagtgcaaacactgtttgtttggcattccacccttggtttacatctaaacgtaactgcgccttagcggcaaaccctgcgtgaattgcttttacacgttcaatatcttgattaaggttattgccgatttttatttttaatacatcaaaaccttgctcaaccgctcgctgacagtcattaagcattttatctatgttatctacgctgatggtaatatcagtctttaactctgacttaccaccaccaagtaacttatataaaggcgctctgtagagtttgccccacaagtcgtaaaccgctaattctaaagccgcttttgcgctgctattaccaatcaccgttgattgaataatgtgagtaagctggttgatgttttcgatttcatgccctatcagtttaggagcaataaactgctgaatcaccgctatcatgccttgatgtgtatcacctgtgataacgggagttgcagcagccgagccataaccgacttgaccacattcggtgtctattaaaaccactaggtcttcaataaaactcacttctctaagcgctgttttaaatggcgtgaccaaaggcactttaagtttcgcaaaacgaactgctttaattttcatacaagcctctatcgaatacgcttaatgttataaacacggtctaggtaacttgtttcttgagataatcgcaggggtaacaagggggtaaccgatacgccattaagcgcactactataaaagctgccatcgcctttgttatagcctaagcctttcacatcatgaataacatacggctcgccttggtgctctcctaaatacatcatcacgtgacctggaatataaataagatcgccaatcgccatatttttaaccaccggtaattttgcgtctgcggtcgtatttttatcaaagcgattattttgtccgtattcactactgccttgctggcctgaattacgtggcattaataagccaaaacttttataaatttcgcctacaaagcctgtacagtcacggccattgtaatcatgtccccagccataacgttcacctaaaaacttaaaaccttgttttattaggttttgctcgttgtattctaagtaacctaaatttacgtcggcggttttactgatcatcgccggttttataacaagctggccttgctcattgcgggtgggcagctgaacaacatggcttgcatacgtgttttgaccattgagcaaattaggtacttgttcgttatcaagcaaaggtaaacgcacacccatatctagttggacttctgagcttgcagtgtcgttaggcacataggcggtatttacttttgcgccggttacaaccaaaaagttatcttgctctcgataagctttaatttcatcggcgtcagcaaaagcgatatcttcactaggagcccatgctaaatagttgtaagcacgaactaagagccattttttatctgcactttgatgcaatacagcaacagcttcacccgggaacatgccgctttcttgaaagcgatctaagtcttgatcaagaccactatttaatacccggtcccaggttggaaaagtgcgcagagcagttcgcttaacaaccataccaaaacgaaccttgttactactggccactttattaaggtttaggttagcttgatatttggcgaagtctttggcggttaactgtctaccatcagtaaaaaaacgcggacttttagggatagagcttgcagagtgaatcgcgcttgttaattcctctttactcaatgttgtttgaaatgacagtggatcaacaatgtatttattttctttaatcagcttttcgttaaaggctgtaatttgcgcctctgtcatgatcatttttgccgatgcacctttcgctaaccagtaattgggcgaaagttgcgactgagtaaccgcaataacatctgattgccagccctcagcatgaataggtgcacaaaaggctacacctaaagtaattgataacgcgataattgaacgacgcatagctgttccttaattcttattgaatgcgtgaatctaataattttgtaaacgcatgctgcaacttttgctgcatttgcttaccgacttttggcaaattggcttcgtcagctccgcctattgactgctgcacgctgaaagtaaattcacggccaccttgataatttcctaaacacacatgtgcaagcatcactgtttctgtggttgagcgcgtttcacttggaccccagcctattttttgccaaacacgccattgtccattagttgcagtgtcgagcacctcttttgcagagcgactatcattaggggctataacatttgccaatgcatttgtaacaatgtggcttatacccaccatcataccgccaaccttagcatgttgatcggtatgtcctgtgccgttaagtagcacatctacatcactactttgtaaattaggcatttgcgtaattggctcacgttgatgacttactagtcgctttaaccattcagcttgagcaagtgtggtcattgctttattacccgttaaaccacaactatcacaacgataccgtaaataaccgggatcatcactgcttgcagtgtaacggtctatctttacagcaaactctttatttatcgggttatgccaatagtcgtctgatggggcaaactgctctgagccatatgcaccgttaaacaacaaacgttgatcctgcagtttcagccagccctcattaaaaagcccacgtaagtattctcgccctgccacattaacaaaataactggcaatagcatttgaattaccatcggctttaccaaatgcttcgtaactattaatactgctgatcaaatcagccagtgctgtatctcctgcaaacacagttgcacctagctcagggtgagcttgcctcactcttgataacgcgccagtaaatgcttgaatttttgatgagctccaaggttcataaagctcattgtgactaccatcacttaaataacggtaagcaagttgcccactcttaacctgataatctatcaataacaacttgcctggttgcagaggatctgcaaagtacagccagtcagcagccacgcgagattgccaatctgcttgttgataattcacctgcgatgctgttttatagtcttttgcatcatcatcattatttaaacttaaacaaccagtatttgttaaatcagcaggaagaattgctggggctagcatgaccctatcaaagtactcttcatcagacaaaacaaccttacttgcacttgtttggcaacccgctagcaataaaaaaccacatgataaagctagccgcttttgaaatgcagctttagtattcataaactaaaattcccattagttattatttttggaatattttattaaatctaacacaatttgaccgtgaagcaagttaactgggatttattgctaaatatcaagaaaatatgaaagtaaaaaggtacaaagtgaaacgagcaaacttaccatgcactttttgctagtgtcatttgaagctacttataccgatacgcttaattaactggtctattgttgtgaattgctattaaacgcgggatataaaaaaataatatggcggacgcgggacgtattttgaaacagtgaaccttaggctgcgtggttcaaagttgctctaagagaaatgaacgcgatataaaattattgcatcaagtttatattgagcattcaagcttctacgcgaatttcaggcacaaaaaaaccgactttcgtcggtttatgtcactttcaagaagaaagtggcggacgcgggacgtattttgaaacagtgaacctccggctgcgtggttcaaagtcgttctaagagaaatgaacgcaataaaacgttgtgtttattcgcaactgaagcctctcctaaaaccaatcctatgcgaattgcaggcacaaaaaaaccgactttcgtcggtttgattcacttagctctacttgagagaaagtggcggacgcgggacgtattttgaaacagtgaacctccggctgcgtggttcaaagtcgttctaagagaaatgaacgcaataaaacgttgtgtttattcgcaactgaagtctctcctaaaaccaatcctatgcggattgcaggcacaaaaaaaccgactttcgtcggtttatgtcactttcaagaagaaagtggcggacgcgggaggattcgaacctccgaccgcctggttcgtagccaggtactctatccagctgagctacgcgtccgcagtgtgattatgcatgtttaagtcgtgcattgactgtatcttaaagacacaaaaaaaccgacagcttgtcggcttatgtcacttcctagaaggaagtggcggacgcgggaggattcgaacctccgaccgcctggttcgtagccaggtactctatccagctgagctacgcgtccgcagttgcattttataatcttgcaatgattttatctttatactcgatgtgagtttcaaatatggcggacgcgggaggattcgaacctccgaccgcctggttcgtagccaggtactctatccagctgagctacgcgtccacacgcacatttgaacattgctaatttattctcttagcaagagactcaagtttatactcgatgcagagttaaagtaaaaagtggcggacgcgggaggattcgaacctccgaccgcctggttcgtagccaggtactctatccagctgagctacgcgtccacacatattactttcaagacatgccattttaggaaaaatggtggagaaggagggattcgaaccctcgatagagctacaaaccctatactcccttagcaggggagcgccttcggccactcggccacctctccgtcttgtggggcgtataataaagatttcagaaaataagtcaaacacttttcaaggaatttcgagtagatggttagagattgtgcacaactgactcaaactccctaaaatcgcttaagctttaggcgttttttctttatcagccaataaatcgagaccagttaaaggaatatgctcatcagttaattctgctaggtattggtcttgatatcctaacttttgaaattcaaagatacatgctcggtaaaagctttcacgttgttcatcactttttgctacatctgttggtaactgcgctggttttgttgtcattttaattaattccatttaagcagtgaacggattttatttagtacattaacattctgactagaaaaatgactttatcaaccttagtttgtattaaaaacgaacaaagcaataattacgtagcaaacaaaaacaacaaatacactatatatcaataatttaaattaaaaataaaaacgctagcgaagaaaaaatcagaaatttcctataacaaaaacgccgctaaaaagcggcgttttctaatcctaaaaactgattaatcagcttgaggacgcatatgcgggaataaaatcacgtctttaattgttggtgagtcagtgaataacatcactagacggtcgataccaataccctcacctgctgttggtggtaagccgtactctaacgcgcgaatataatcttcatcgtagtgcattgcttcatcatcacctgcgtctttttcttcaacttgacgagaaaaacgctctgcttggtcttgcgcatcattaagctcagagaaaccattcgctaattcacggccgcctacgaaaaactcgaaacggtcagtcacaaatgggttttcgtcgttacgacgtgcaagtggtgacacttcccatgggtaagctgtgatgaaagtaggttgaattagcttatgctctgcagtctcttcgaagatttcacataagaacttaccagggccccatacacagttttcagggatcttaacgtgtacttgcttagcgtacgctttaagctcttcaaaatgattttcagggtcattaaataccgcagcatcaaagtctgggttgtacttaaggatagcctcgctcattgttaaacgagcaaaaggttgaccaaaatcgtactctactgaatctaccacttcaccgttttcatttttagttgtgtttacaacaattggtgaacctagtacatctgtagcaacagtacgtaacatgtcttcagtgatgttcatcaggtcaatataatcagcgtatgcttggtagaattcgatcattgtgaattctgggttatgacgtgttgataaaccttcgttacggaagttacggttgatttcgaatacacgctcaaaaccacctaccactaaacgttttaggtaaagctcaggtgcaatacgtaagtacatatcgatatcaagtgcattgtgatgtgttacgaatggacgagcagacgcaccaccagggatcacttgtagcatcggtgtttcaacttccatgaagtcacgatcagctaagaaacgacggataccttcaacaacttttgagcgaatacggaaggtttcacgcgtcgcttcattggtaattaaatcaacataacgttgacggtatttagtttcttggtcagataaaccgtggaatttttctggtagcggacgtaatgacttagttagtaactcgtactctgtcatttctacgtataggtcacctttacctgatttatttagtgcacctttaacaccgatgatgtcaccgatatcaagttgaccgtattttgcttttaattctttttgtacgtcttttgacgcgtacgcttgaatttggcctttcatatcttgtaacgcaaggaaaggaccacgttttgcaagaatacgacccgctactgatacaacgtgctgctcagcaactaattcgtctttcgatttatcaccaaactcagcttgcaaatcagccgtgtaatgttcacgacggaattggtttggatgaccgttggctgggcaattttcgcggattgcgtctaatttgccacgacgctcagcgattaacttattttcgtcttggatttgatcagtcattttttagctcttttttagctcggtggttataggccagatttaaggctggcttcaataaatttatctaagtcgccgtcaagaaccgcttgagtattacggttttcaacgccggtacgtaaatctttaatgcgcgagtcatcaagtacgtatgaacgaatttgactaccccagccaatatcagatttagcatcttcttggctttgcttctcggcattttgcttttgaatttcaagttcaaacaacttcgcttttaactgcttcattgcttggtctttattcttatgctgtgaacgctcattttggcactgtacaacagtgttggttggtatatgcgtaatacgaaccgccgactctgttgtatttacgtgctgaccacccgcaccagatgcgcggtaaacgtcaatacgtaaatcagccggattaatatcaatttcgatattatcgtcgatttctgggtaaacgaatgccgatgcaaacgaggtatgacgacgaccacttgagtcgaatgggctcttacgtactaaacggtgaacaccggtttctgtacgtaaccaaccgtatgcatattcgccaacaaaacgcactgttgcgcctttgataccagccacatcaccatcagttgcttcaactagttcaactttaaagcctttcgcttcaccccaacgtaagtacatgcgcaacaacatgttacaccagtcttgcgcttcagtaccgccagaacctgattgtaaatcaaggtacgcatcgttttggtcatggtcacctgagaacatacgacggaattctagcttttcaagctgtgcgtttaaatcggctaattcagtttctgcttcggcaaaggtttcttcgtcttctgcttcaacagcaagctcaactaagccttcaacatcttcggtaccggccactaaattatcaatggtctcaacgatagcttcgagtgccgacttttcacggcctagggcttgagctcgctctggctcattccacactgctgaatcttcaagttctgcgttaacttcttctaaccgctctttcttaagagggtagtcaaagatacccccgaagcagttcagtacgttcgcgaatttccttgatttgattaatcacaggattcacttcaaacatgtacattactccaaaatggctgatttaccgcgcaccgctttcgacaataattacggtaaattatctacaaatattaaaaacgcccgattttaacaaaaaaccgagcgttttattagccttttatgtcgattataacgatatttttatgtggttttttgtagctctcggataattagttgtaacgagaatttgccacgaaattcatttatatcgagttggtatgccgcttttacatagcgtacttcggtgtcgggccaggcacgcacgtcaacagcaaatgctattgcgtcaactaaccttccagattgatgttttaaaactagttttaagtgtttttcaccaacaatacgctgctgcaccacttcgaacacatgttcaaacactggctctggaaattgttgtccccaaggccctgcattttttaacaggttggcaaactccatcgagaagcaatcatttggcagttcaccatcggtaagtaaaatactttgcttatgctcttcactgagtgtttgtgccaccatgtgttcaaacactgttttaaattcattaaaacattgctcgttaatacttaaacctgccgccatagcatgaccaccaaacttgctgatcagatgagggtgtaaggtatttatgcgctcaagtaaatcacgcatatgcagcccttcaatggagcggcaagagcctttaatttcaccgttatcgccagctgcaaaaataatcgtaggacggtgatacttttcttttaagcgaccagccaaaatgccaataacaccttggtgccaatcagcttgatacaaacaaatggcatcaggcactgaatctgttttaaaggctaaacggtcaagcacggcttgcgcttcagtttgcatgccctgctctatttcacggcgctcatgattgaggctgtcgagctcactggcaatgcggcgggcttgatttatatcgctcgataataaacaggctatacctaaactcatatcatctaagcgccctgctgcatttaagcgtggcgccaatgaaaagccaaagtcactggcacttaagcgcgctgcattacgatttgccacttcaatgagagcactaatacctggacgtgttttaccgctacgaatacgagctaaaccttgatgcactaaggtacggttattggcatcaagggcgaccacatcggcaacagtaccaagggcaacaatatcaagtaattcggccaaattcggcattggctgatgttgaaaatacccttgatcacgtaagtgactacgtaaagcgataagcagataaaaagccaccccaacgcctgctattgatttcgatggaaattggcagtcatgacgattcgggttcacaatggcatcggcattaggtaatgcctcgccctgcaagtggtgatcagtcaccagcactttaatacccgcatgctttacaattgcaatgccatctatgcatgaaataccgttatcaacggtaatcacaagctcaggctgcatggccacaatttgctctgcaagcgcaggacttaggccataccctaaactgaatctatctggcactaagtaatcaaggtttttcaaaccaaacatggcaagaccttgcatcaaggttgctgtactggttgcaccgtcagcatcaaaatctcccacgattaacacgcggctttgtgcttttaatgcgtcttgcaacaacaacacggctttgtcgatgtctttaaacaaccgaaagtcatgtaacgttgctgcactgttatctaactctattgcgtcttgcacctgtcttgatgcgtaaatttgtttaatgactggatgtaaatgatttggcaggtgtgagtcatcaacgcgaggacgaacttgaattattttttccatgttggaaagtgtacttcttaacttaaggcgaataaaaaaggcccacgacaaataggccttttcgtttaaaaatagttatgacgatgtttttggtagagcatcaagtgcttggctgatttgcgcagctgattgataacctgggatcatcgtaccatcttctaaaataattgccggtgtacctgacataccaaagctttgaccaagttggtaatgctctgcaatcggggcgttacaacctgggactgcagctacttctgcgcccgctttagcttctgttaacgcttctgctgggtctttagcacaccacacattcattaagtcttgataacctttgcccgctaaaccgcctcttggaaaagctaaatacttaacagtaatacccgcctctaaaaagtcgtctaattcgcggtgtaatttacgacaatacccgcaagtgatatctgtaaatactgtgattgaatgcttttcgttttttgctttgtaaacaatcatcgagtcttcgtactctgcaacgccttgtttacgcacatcacttaacgcatgctcggttagatttacacggttgtttaggtcaatcaacgtaccttgcattaagaattggccatcagggcttgcgtataacacgcctttatcggtaattagctctttaagaccagccacagggcttgggttaacttgcttaacctttacacctaattcggcaaattttgaaacaattggtgcgtcagcggcttctgtcgtcgatacgccatttgcaaaaacatttaagcttgtgccaaatagtgccgtggctaaaactaactttttcataactatcctatatcctgaacattttttacatagaccggtacatcttaaaaaaagttgcactatgcacgagggtgatgctgctcgtgtaccgactttaatctttcattcgctacatgcgtataaatttgtgttgttgataagtcactatgacctaacatcatttgcacaacacgaaggtctgccccatgattcaaaaggtgcgtcgcaaaagcatgtctgagcgtatgcggtgataatggtgactctattgctgccaaaatagcatagtgtttgatgcgatgccaaaaagtttgtcgggtcatgccaatgccccgcttagacggaaacacaaagtcggtagcgtgtttaatcatctgcgagcgccctacttttaaaaactgttcaagccagtacattgcttcttcacccaaagggactaatcgttctttattacctttaccttttacaaatacgactgcttggcgcaggtttatttgctccattcttagccctaccagctcagtaacacgcagcccggtggcatacaacagttcaagcatggctttatcgcgaagtcccattggatcttcaatattaggagctgcaagcaatgcttctacttcggcttcagagagagtttttggtaacgattgccccgccttaggttgcgcaatattaaccattggtgagtcggggattgctttttcgcgcacaaaatactgataaaaacgcttgagcgcactgatacttcgagccgtgctgcgagactttagtcctaaatcgacacggtatgctaaataagcttctatatcttctgctgttactgcaagtaagtctgtgtctttaataaattggcaaaacttatcgaggtcacttcgataagcagcaagagtattctcactgaccccttgttctaaatacaaggtatctaaaaaaacctctaaatgctctgcattttgttccgtcatgacacctgcttgtgcttgtgaagtattatccgccacggttactctcatccttatcaaggtatcaattaaataggccttacggtaaaatattaccaaactacatgaaggtagatacttcaagcggcttgagtagctatcatatcaggcaaacacacggtgataaatacgatgcagattggtttattttatggttcgactacctgctatacagaaatagcggcagagaaaattcgcgatattattgggcaagacgttgtgagcttgcataacatcaaagatgaaccattaaaaaatgcagaacaattcgatttcgttatcttcggcatttctacatgggattttggtgagcttcaagaagactgggagtctatctgggatgatatcaaagatgttaatctaaatggcaaaacagtggctctgtttggcatgggtgatcaacaaggttatggtcaatggttccaagatgctcttggcatgctgcacgatgaaatttgtgatcaaagcatcaccttattaggaaagtggccaaacgatgacagttacgagtttgaagcatcaaaagcgctgactgaagatggcaaacaatttgttggcttagcccttgatgaagacagtcaatacgaactcagcgatgagcgtattgccaactgggttgagcaaataatgactgaatacagcgaaagtttgtaaaagtcgcttgtaaggaaaagccaagcaatgcttggctttttttattcaacgcgttgccaatattgattacgatagaaaaaagcaatatagccacgcacttcaagcactttaccttgttgttgtggtgtcaattttaaggtgtaggttttgccattattagggtcaagaatttcaccatcttgccaacttccatctccggcatcctttgcgccttcgataatctgcaaccccaaaataggctgatttttcttatcacctttacatttttcacaacgtgcatcttgcttagctggattcaatattttttcaacattgccaaccagcacgccgttttgttcactaatacgcacgagtgattttgcttcattcgtttcttcatcaattgttttccaaagccctaccgggctgattgttgcagcgcatagttgagaaaataacatcgcagcgagtacaaacgctaaacggaacatagatcacctactttattaagaatttattactacaattaatttttttagacgcatcattttgttatgcttgaggtggatggataaccaattgaaaggatacacaatgaaacaattcactttagtgactggtgatgttattcaatatgacaatcatcaaattaacccacttcacgccaaaggcgaaattacagtaaatagccttaacgaacaagtatttataccacaaagcgtgaaaacagcgaatgaactaggcaaacttaaagataacctatttaacatcgaaaaattattacactctggttatgccgatccctatcccagcattcgtgtattaattgaaaccacgcaaccactgcctgacataacgggactgaacatcaaacggcaatttaatatcatcaacttttgtagtgctgatattgataaacaacactgtaaaagagtactagatgctttacttaaacttgaatatgttcagcaaattcaacttgatgaggtaatacagttacgtccacctgcgatccccgaacagtaattagaatcgccaaaaatctcatattagcgttacattttcaaataaaaggctttgcaaagcctttgataatcggcgctgtaactaccatcctgagcatgaataaccaactgcgattttttgcactctatagcctgttggctaaataacattaagcaacggctcggcgcttttttgggtgttgtttgaatcaaacattgttgatttaaatgccaacctaattgctttgcaatagcaataaattgctcagcttccggacaaggcaaaataacattcaacaacgttttgtcatgactaagcctgctacatgcagctattaattcgttaaaactaaggccatcagtatgacgtgcagcattacgtggcgcattctctcctttgaggctggcgttaaaatatggcgggttagtgatgataacatcaacgggctctggtgattcaaatgactgcacggcaccttgataaaggcggatatctgaccacgggctattggtaaaattagcgcgggcgtcgatacaagcatcatgatcaatctcgatcgccatcactgttgcttgtggcgctcgctgttttgccattaaggccagcagccctgttccagtccctatgtctaatatacgagtggcgttagtaagagtggcccatgcgcctaacaaaatgccatccgttgacaccttcattgcagcacgagtttgctccaccgaaaattgtttaaacacaaagcctgacattttttcaccttttcattcaccacagccgcgttaacgcgtataattaggcctaattgtcctctatttacgtcactctatgcaattttctgaatttgatatcgataacaagctgttaaatgccattaataaaatgggttttgatacaccaaccagtattcaacaacaagcgatccctgaagcgctaagaggccgcgatattttagcatctgcgccaactggtactggtaaaacagccgcttttttgatccctgcaattcaatacttgcttgatttccctcgtcgcgatcctggctttgctcgcgtgctgatcatgacaccgactcgtgaattggcttatcaaattcatgaacaatgtgaattacttgctgcgcaaacacacctcaaaattggtgtagtaaccggcggtattaactacgggacacataaagaaattttcgagagtaataacgacattttaattgccacgccagggcgcttaatggaatacctcgaaactgagaatttccatgctgagaatgttgaactgcttattcttgatgaagctgatcgcatgctagacatgggttttcgtaaagaaatgctgcgaatttgtgacgaagcacgtaatcgtcgccaatgtttcttattctcagcaacacttgaaggcgacagcgttgagttatttgcagaacgaattttaaatgaccctgcactacttgaagcagagtcaacccgaaaagagaaagctaaaattcatcagtgggttcacctagctgatgactataaccataaactaaaaatgttggtcgagatcctaaacggtgaagacatacataaagcaattgtgtttgttaaaacccgtgaacgcttagaaaccttgattggtgagcttaacaacgaagggttacgcgttgcatggctacgtggtgaaatgccacaagacaaacgcatgaaagcaatggagaactttcactctggtcgcaataatatcttagtggcaaccgatgttgctgcacgtggcattgatgtcgccgatattagtcatgttattaactttgatatgccgcgtactgcagatatctatgtacaccgcattggccgtactggccgtgctggcaaaaaagggattgcgatttcatttatcgaagctcacgatgtggctattctgggcaaggttgaacgctacattgagcaaaagcttaaacgtcgcgtaattaaaggtattgagcctcaacacaaagaagcaaagatcccatctaaaaagaaaaaagatcctgcaaagatcaaagcgaagaaaaaagccaaagcaaaagtaaaaaagaaaaaatagcttaatatctttacttgaaaatgccgagctcgtctcggcattttgctctctgccgcatgtacttttttactaattactgtgtaattagttcataccttttaacctaccaagcataaaatcactttataatcataagcttaaaattggaatgataattgtaactggttctgcaacagagtcttcgcgagggaatcgtatgaaccgctttaaattaaccgtagtactgatctcattaagttgtttatttttactagcttgtgcgacaaaggtgagtgcaaataccagtgttttaacatcaagcacatcagcacaacctagattgcaacaatatgctttgcagaaacttaccagcaaccctaactttactatttctaatctacaggtgattgtagagggtgatacggttgagcttatcggctctaccaagacaggatttcaacgtgctttagcacaaaagtttttggagcataaccgaggcatccgaaaagttaaaaacaaccttaaagtaagctcacaagacggaacaacactttaaggttgtctgcaccttagccttatttaccgcttgcttgaaggttaataaatttggcaagttcttcaggttgtcccattaacgccataatttgctgattgatttgcatcatagactgaccttctggcaagtttgccgaaaccgataatgatgataagccttcagcaaaattagtaatagcagtctctaagtcagtgctaaccggcgcttgttgtaactgcatagcaacaacctgctggaactgttcatgagtcataccttgcgcttgcaagaagctctctacaaccgcttttaactcaccttcatctgcaactgacagtgaaatacttcgtggctctaactggctcatggccgccatcatttttgattgctgttgcagttgctgctctaatgtgagctggccattttgtgttgagttttgcatcttgctgatagccaatgacgcttccattaaaggagttgatttcgccaaccctaaattaaagtgaacatcggccacttcatttgcagtcacgttaactgcaaacgcactatcaccagagtctttattgtaatctagcgaagacttaacgttatagcttgtagacgctaatttgttgttggcgttttgcggtaactgggcaaggaaatcatcactgaaccgaaagtttgtcatcacaaacccagtatgaggtggaatgctgtcttgctcataacctgatacttcaatcgtatctatggttgcaatagcttcattgctatcaaggctttgtactttgatacccgaaagctccatgctgctatcaaaaacactcgctgaaatatcgctataagtaatatctacaccactttgtgttgataaagcactcagctgctgatcaaccactgttttcacttcctgtgtcacagcatagtttgcgtaagctacgccaccgactgccgcagcaacaaccgccgcaataattaacttcttcattttatttcctttaattggtgtaaattttttatcagtgtatcaaattgtgtttagttaattaacgacagtaattcatgcacagttttcactggggtaatttttgcgcctaagccttccattgatttatggtaattacgataaggaataaagatttcagtaaagccatgttgcgccgcttctttaactcgaggtacgccactgtctattggtcttacatcaccatttaaacttaactcgcccataatacaagtagtccgtggcaccacaaactcattcaaactacttaaaagtgctgtaactaacgctaaatcaatgcaggtttctgactcatcaatttttaaaccaccaactatattaaaaaacgtatcatggaagattttagttttagtgtgttttcgtaaaatccccgtgagcatcttgatacgattcatgtttaaaccaacacacactcgttgagggaattcagcttcggtttctgtggttagacattgaatttcgagtagtaagttacgattgcctttacgaatacaagtaatcgcagagcccggcgactcagtcgttgagcctgataggaagatttcgctcggattatcaacgctcagcatacctcgctcacacattctaaaaatgcccacagtgtcgatatcgccaaaacggtttttattggcacgtaatgtccttacttgcccatcattggtgtcaatgtgtaataacgcatcaacaatgtgtactaaggtttgtggcccagcaatttcgttatttttgtttacgtgagcgataataaacatggtcacatcattttgcttacaatattgcgtgagcgcctgagccgcacttttcacttgtgagggtgaccctggagtaccatttgccatttctgttacaacagcctgaattgagtcgataacagcaaactttattttatgtttatcaagttcttcaatgattgcttcaacgctggtttcagatagtaagtacagctcatcttcgttgtaatctaggcgtaagcggttaacccgatttttaaactgtgataatgactcttctgctgtacagtataaagacggcattacttttgacatacgtgcaactaaatctgacaacaaggtggttttacctgcccctggatccccagaaataatattcactgagcctgtggtcacgccgccacttaataccctgtctaattcaccaatttctgtgaggcgcttttcagcttcagtggttgcaacttcatttattttttttgaaccgccgcccacattaccggcatagcctgcaattgcagctcgacttgcagcttgctttgactgccctgctgacggtttaaactctgcaagggtattccatgcaccacatttacactgcccttgccagcgctgataattcatgccgcactcagtgcagacaaattcgatttttgctgattttgccattcggccttacctgtttggatagctggtatttactgaaccactattttcaagcatctagtagacaaagtaaaactgactactaaggtaattgatgtatagtagatttaaaaacatcgaagataatacatggtaacttgctccctatcgaccttcttatatgttaactgttgactaaagaacaagttaagggcacagtttttgcttaataataaataccagagaacttgccattttattggctagtacttataacaataactaataaaacaacaaagtaattactactcgcgtagtgagctgcaaaacaccgccgagtaatactacgttatttgatagacagtgatggttttataaatgcctgaagatatcttgcttaaatacgaaagtctagttgaagaactaaaggcgaatttaggcacacctcaattcgacaagctatttaaagcaaaaacagccagcttaactaagccagagcagtttttgatcaaaatggagatgtcgcgtttatctcagcctgtagcacgctttatcgatttgcgtggtcaagtcactggacaagtaaaaccttacgagtatgaaggcaaacagcactttatggatgacaccgccattgaagtgtttgaagatgcgattaaacgccacggtggctatacccttgcagtctatgaagcggtgatgaataccgaaaacaatcaccgagtgatgcaaaaaaaagccgccgagcaagacctcattagcgatgacagcagtaatcagttaaccgcaaaagttatcaaatttgcttcttatgaaagccgctctgaagagcgcatgaattactccataaagatctcggttgaaattgataaagaaacgaaagtctcagcatcaacttctgatatctcgttaagcggtgcaaaaatcaaacttgccccccgatataaattaaaaaaaggccaattaattggcttacgcttggttggtctcgagcaagactttgagctgggtctgaaaaatggtattcaatatgaagtcattgccgtcgaaaaggtatcgcgtgaatataatcatgtgcgcttaaaacgtacctttatagaaaataacaagcagtttgacgactttttaaatagctttatccacggcaataaacgacgctataaagttaatttagacaataccttagatgctgttgtctctaaaggatatgagcaatactatattcctcgagtgacttcgctctatacgtttttaagtttgcagggtgacaagctttacccaagtctcgccttaacaacagaaaacaatatatttattcagcgttacttttgtgatgagcgaaaagtgtcatgtttatacagtattgttaatcagcagcgcattgctcacttactcagtagccctgatgccgtaaaagaagactatatttacacttttactcatacagtatctggcagaatatattactattcagcaactcgctctgagttaaataatcagcctcatttaaaagatttgtttttagggtttggtagtcaaaaagatagctggcagtgttttaagcttcagctaatgccaagccatccagaagattcatacattccattgacgttaccaagtagcgcaggtaaaaacatcgaaaagctcaataagccaccgactccacgtgtgcaaggcatgctaaaagacgttaaatacttgttgattttgacttcagtgggtagtgagtatgagcagaaaaaataccaacaacgtgtatttgataaaactgcggttaatcaattaaaacaatttggccacagtaaacacaagacaccgcctcatctagagcctgttgccttagagtatgtgaatttaagagcgcataagcgattcttatataaaacatctgtcacggttaagcataaagagcaacttgtgcagggctacacacgtgatctttcagttatggggttacaaattgaatgtgagaaacctgtagactttaaaaagggcgatatcattaagttaagcttgcctgagctacagaaaatcaccaaaaaacacgacctaagtgatcttagctatgaagttatggcaataagtaagtcgcttacaactgtgaatttaaaagtacatcgagtaaccgatttgcctcatatggcaataacctttttcacggtgttgattgataataataaagataaactaaaagtgtgtgaagaaacccctaagattcctgggctctctactgcacttagaaacatggtaacaaaaagtgtttgccaatttccgctttatctccataaagaatcagcgcattttaaaataggtgctattgggcaaggcttatacccaagtccattacatgtgcttttacaaaattttgcactacttaatgaaagcaccagcattgatggcttgttgtcgacagaccaaataaccgaagtgatcaccccacttatcaaagatcgcagtcgtcaagatgctcctttgccatttacactttttgtttgttttaacccacgtttaggcacaattgctgactcaataaccagccgctgcatcagcgatgaggattacacatcacaaacactatttgtaaaaaaagcactgaaaaacgacttagtgtttgtatttcgtttatatgtatcacgtacaggccggcctgatattgattacttatcgaatgagcttaagtacatcagccaatatgctttacacaaagcaaaagatttagaggaagcattatgggctgttgctggtgtgggagatttaattgatataaccgaagaagcgcttacccattttgatattgaccaaaggctgatcgacgaaatgagtaaacgcaaagcaatctggttaaagcgagtaatctagcggtaggcctaacaagtaagcaacttgcagcaacgaaccttcgttaatagccgtttgtgcttgctcaaccactttaggtttaccgtgaacagccacaccaagccctgccgcagccatcatttttaaatcgttagctccatcacccatggcaacagtttgacgattatttaaggcaagctttgcttcgattcgtttaagtacacgggctttttcttcagcatcaacaatagtgccaatcactttacctgttaaacgattatctttgaactcaagggtattagcgtgcacttcatctaaacctattagtgtttgcacttgctcagcaaatggtacaaaaccacctgatgcaatggctaaatgccaattatgttgttttaagtattggcataattcactaacacccggcataagtggtaaacgtgcttttaagccatcgattagatcaacatcaataccttcaagcttagcaacacgctgttttaagctttgtgcaaaatctaattgcccagccattgcttgggcggtcacagcagccacttcatcatatacatcagcaagtcgtgctatttcatctatacactcgatagtaatcgcggtagagtccatgtccattaataatagaccaggctcatcaaccgtaggtggattagtcaactgcaccagttgaataccaatttgcttggcaaactcaactaataccagtgggctgagtgttgttgttgcatcgctatgaaagctccatgccactggcatgtctgcaattggctgataacaacatagcgataaattgctaaacccttgtgccgctaaaaactcactaatagccagtatttgctcagcatcaagtactttaccgaatgctacgctaaatacgccctgacttgcttttggcgtaaagtctgttgtaataaggtgtttgttttcaattttataccagcaatttaggctgatttgttcagctaaatttgctgaaggtgtagcagctaagctaagctgtgacatagtggctccacattagacttatgtctgtccttgcgcgcgcatgagctactcgcaatcaatgaactaataaggttattatactggtttagttgtaccatcaaattgaaaagctgtcagcagcgtatacggtgactatgaaaaataaccaactaaaaactccattttcggctacataccgccaacgtttggtgcgtttaagtctagctgcagcctgttttgtgctgctgagctgggttgccgttaatagtagttttcaaagtcatcagttactttatgatagtgcagacagcacagcgataagcttaaccaagtttatggccctaaacgctaaaaccccactactagaaaaaaacaaaccagaattaaaggcgctatgtaaccacatagctgcagatgagtatgtgttagctgcaataatttacgaccaacaaggtattcaagtagctgccagtgataactggcaaagtcaccatacctttggtttgttaccggattcaacgccgggcattagtaaattaaaaacaccatttgttgagcccgttattagtgataacgagcgaccactggggtttgtggcaataacgtatcttacgcaagcatcgatagccaccagccacagtagctttcatgacttaggcagacaagtattacttatgctcgtaattacttgtatttttacgtggcaacttggccgtggcctaaaacgctggcaatttaatcgctatatcaaaaaaagcgcagagcaagaatcgtaaagttcggcagcaagttgctgctttgcatcacctatcacgcctttaagctcacatagatgagcaaacacatcgcgcaccttaagcggcgtattaacctgcccttgaaaaccagctagcggcattgatggcgagtcggtttcaagcactaaatactgtggttcaattgtgcttataactttacgagttttagcagcgcgcgggtaactaatcacgccaccaacaccaagcttaaacccttgtttaatataactctgagcttgttgctctgaacctgaaaaggcatgaataacacccccatactttggcttacaacgcttaaatgagcgggcaattaaatcatggctttgtctgtgatgcacaatcagtggcaaagcaagttgattggcaagctctatctgcccttcaaaaagctgcgtttgtttatcgaggttgtcgatactgcgatcaagaccgcactcaccaatggcaataaactggcctaaattagcttttgctaactgctctaattctgcgaggtgatgagcttggtggtcatataaaaaataaggatgtaagcctaaagcaactgaaatacttggctctgatttggcaaaagaaagaagtgctgtagattgtgccaagctcacacctggcacaataaaatgctcaattcctacttgcttgcatgctttgatgagctctgtgcgagtttcatcaaattcgctaaaatcaaggtggcagtgggaatcgataaaacgcatttacggatttaaacgaccaaactgccaactaccgtcggcttggcgttgatacataaagcggtcgtgcaggcggtgcgcaccaccttgccaaaactcaattttagtaggctcaacacaatagccaccccaaaaatcaggcaatgggatttcaccatcagaaaacttttgcttcattttcgcaaatgtttccattaacaccttacgtgatgacacaggacgactttgctgagatgcccatgcagctaattggctttctttaggacgcgataaaaagtacttagcaacagcagttgttggtaagggtttagcctcaccataaacaatgacttgtcgctccatatggtgccatgggaaatgcagagagattttgttattacctttaagctcctgcgccttgcgcgagccggtattggtaaaaaacacaaagccattttcatcaagatgctttaacagcacgatacgctgcgaaggctggccatgttcatcaaccgttgcgactaccatcgccgtaggatcaggcaaattagtggcaacagcttgctcaagccatttttcaaactgcttgatcggagacgcatcaagcatgtcttcagataaaccatcctgtaaatattcacggcgaatatcttcaagtttcataaaattccctctatcgctatcagctaaagattaatcaaggttgttgagctgtcaatttgttgggtttcgctacgctctacccaacctacaaagcgcatcatctgcaagtataggagtgctttcaaagcgaactacacgaagcagaatttacctaagtagtttagcctaagacaaggcggaaaaccgacttatccctttgagttcttaaactttctgcaagtgtaggagtgctagcaaggcaatgagtttatttatgcctaggagcatacgtgttttgtatgtgacttaggctaaataaactcattaacgcagctaaagagaactacacgaagcagattacatttgctccattacttcgatacctaaaagatccaatcctgacttcagcgtcttcgctaccaaattacacagtactaaacggctgtcacgaacacttggctctacgccttctttaagaactgggcatgcttcgtagaacgtcatgtataggcttgctagttcgtataggtatccacataatacgtgcggtgtcgcttcgctgatcattagatcaagtacttcttctaactgtagaagtttaagtgccagcgctttttcttgtggctcgttgattgcaacatctgctgttaatgacgctgcatcgatacctgatttacggaaaatactgcgaacacgtgtatatgcatattgtaagtatggcgctgtcgcaccttcaaagctcagcattgtgtcccagttgaagatatagtcgctggtacggtgcttagaaagatccgcatattttactgcgccaatacctactttacgggcaatttcgctacgctcttcgtcgcttaaatctgactcacgctcagcaagtttagctgctgcacgagtgattgactcttctagtaagtctgcaagtttaacagtaccgcctgtacgtgttttgaatggcttgccatcttcacccatcatggtgccgaatgggcagaattcataacttgtttcatcacgtaataaacccgctttacgtgctgttagctcaacttgattgaagtgtaagctttgacgtgcatctacaaagattaagatacgatcagcaccgagtttatttgaacggtaatcacaggccgctaagtcagttgtcgcatataagaaaccaccacctgatttctgtacgataaacaccgaaggctcgccgtctttgttagcaagctcatctaagaacaccacttgtgcgccatcagattcaacagcaatgtttttgtcttttaatagcgcaatgatgtttgcaagttcgctgttgtaagcactttctgccatgatgtcatcttgcgtaagcgttacgtttaggcgtttgtaaacttcttcagagtgctttacagaagtggcaatgaatagcttccaaagtttttcacagtgcgcgtcgccgctttgcaatttaaccacgtagttacgcgctttatcggcaaagccttcttcatcatcaaagcgttttttcgcatcacgatagaaggtttctaaatccgcaagtgcaacagattctaaatcaacaccttggttgatttgatcttctaagtgcgcgattaacataccaaactgagtaccccagtcacccatgtggttttgacgaacaacttcatcaccacggaactcaagggcacgaacaaccgcatcaccaatgatagttgaacgtaagtgacctacgtgcatttctttagcaaggttaggtgatgaataatcaacaactactttttgtgctgttgcatgtggcgcaacagccagcttttcgtcttcgtttgctgcttttaagctagctgataaaaactcaggctttaagtgaatgttgataaaaccagggcctgcaatttctgttttttctgcgatatcagcaagatctaggttatcgataattttttgtgctagttcacgcgggtttgattttaattttttagccgcgcccattgcgccattgatttggtaatcaccaaactgcgggcgtgtactttgtgtaaccgctggatttgtgtcttctggtaatccagctgcaaccatagctgcaattgctttttcgattaaaagagtacgaatattcattgtaatttttacctttatggcccgcagtacgggcacttaaatttgatgcaagcttagtgtattagttttcgcgtgtatgattaaacttgatgtctggatagcgttccatcgataagttcaagttaacacggcttggtgcgatataagtaagattatcgccgccatctaatgctaagttgctctcgcacttacgcttaaattcttcaaactttttaacatcgtcagagcttacccaacgggcagtgtttacgctgacaccttcgtaaatggcgtcaacgttgtactctgctttcaagcgcgcaacaaccacatcaaactgtagtacaccgaccgcgccaacgataaggtcgttgttaataagtggtctaaatacttgcacagcaccttcttcagatagctgaactaagccttttaataattgcttttgcttaagtggatcttttaagcgaatacgacggaataattctggtgcgaagttaggaataccaccaaacttcattttttcaccttgtgtgaaggtgtcaccaatttgaatcgtgccgtggttgtgtaaacctatgatgtcacccgcgtaagcatcttgcgctcgctcacggtcaccggccataaaggttaccgcatcagagatactcacttgtttaccaatacgcacgtggctcatcttcataccttggctatatttgcctgatacaatacgcataaaggcaatacggtcacggtgtttaggatccatgttcgcttggattttaaatacgaagccagagaagttctcttcggttgcaacaacttggcggtcttctgtttcgcgtggtagtggtgcaggcgcccactctgttaagccatcaagtacatggtcaacaccaaagttacctaatgccgtaccaaaatacacaggtgatagctcgcccgctaaaaacagatctaaatcaaattcatgtgatgcaccgacaactagctcaagctcttcacgaagctgctctgccagttcgctaccaatagcttgatcaagctctgggttatcgagtcctttgattgttcgaacttcttgaatagtgtggccttggcctgtgctatacaaaatcgtttcttcacggtgaatgtgatacacacctttaaactctttaccgcaaccaatcggccatgtgataggtgcacaggcgatattaagctcggtttcaacttcgtctaataactccattgggtcacgaatatcacggtcacacttattcataaaggtgacgataggtgtagtacgtaagcgtgttacttccattaatttacgagtacgatcctcaacacctttcgcagcgtcgattaccattagacaagagtcaaccgctgtcaatgtacggtaggtatcttcagagaagtcttcgtgtcctggagtatcaagtaagttaaccagacgctcattgtaaggaaattgcataactgacgtagtaaccgagataccacgttctttttccatttccatccagtctgattttgcgtgctggtttgagccacgaccttttacggtacccgctttttgaatcgcttgtccgaataagagaactttttctgtaatggtggttttacccgcatccgggtgcgagatgatcgcaaaggtgcgtcgtttattaatttcggtagttaaattagacatgtaagctgcttttagtcataacaaagcgcacttaactgccttataaattataaagctcggtgcgcactgtaaaaataaaatagaattgccgagtattataccttgtttgtcttagccaaaaaagcagcgattgtaagtaattattcaccttgggttagggattttcgttgttcacttttttgctaagcttgtgtaatcaagttgtaacgcatactatggataaattgcacggaggatattaatttaggtcatgaaaaccagtaagctcagtattcgattattatggtatatcaccccattagtgattttacctttgttgtttttaggtggctttacgttaaccaatgtgaccaattcaacaaaaaaacaagctgagctgattgtgagtcgctttgttgaacaacaacaacagaagatctttaactacatcgactcgtttcattctattacgcgtttattatcaacctctcctgtacttgccgactttttgtctcgagagccgggctctaaaaatcaatatatcgagcgacttggcgaattaatgaatgtatttgccagttattcagaagcttacccagatataattagtattaattatgttgccccagacggcagaagtgatgctttttattcaagccaattgaccccagcgccaaagagctacccgtttttcaaacaagtactcaaatcaaacctgcgtcaacagcaatttatgatccccaaagaagacggttcgaccagcctctattttgtgcatccaatttataacattgattactacctaaaacagcctcagcagcttggctttattgtggtacatgttgaaccatctattttaaacgccagtattttagaagccccatttaataacaccctaaatttattcttaacgactaaagggcaaattttatttagctctgattatgacctgcgcggcaactacttgagtgaatatgagctcgagcaaataaagagattagctgattacggaaaactggccgatattgaattatcaagtatcgataaagaagagcgaattatctacgctgtgcaaatgacggacggcgactatttcatttcaacaactcccaaagatttactctatcagtcaggtaaagcaattagcttaataactgcactgattgtaattatctcagtgatctcgttaccaattttaatttatatcgttgttcgtaatttactgttaacccctgtcgaattattaggtgctgcaagtcaccgagtaggtgatggtgacttatcagtttatttacctgcgcatactaacgatgaagtgggtgtcttatttaacgattttaatcacatggtaaatcaaattcgtgactaccaagatgaactcgaagagtacaaacaccaccttgaagaaaaagtagaaagccgaactaaagcgcttgaagctatgaataacaaacttgaagtggctattgcccaagctgaacaagcaaaccaattaaagagccgctttttagcaaatatgagccatgaaattcgcaccccacttaccgcaatcatgggttttactgagcaactgctacacaacaaagatgcggtgaacgatgagcagcatttaagtacaattttgcgaaactctaaacaccttttagagctcataaataacattctcgatttatctaaaattgaagcagaaaaactggctgtcgaacgaagcccttgctcggttgttcaattaattcatgatattgattcaatcattcgcccattagcgaatcaaaagcaactgcagtttaatattaattacaacttaccaattcctcaaagcattaacagtgataccacacgcttaaaacaaatattaataaacattgctagcaatgccgttaaatttactgagcaaggctttatctcgcttgatattcactataacgatgagcgacagctattagaatttgtcattgaagataccggaattggtatgtctgagcgtgaagtagaacgagtatttaaaccgttcgaacaagccgatgccacaacaactcgccgatttggtggaacaggcctaggtttatgtatttcaaagaacttggcccagctattagggggagatgtaaagcttgtcagcgagctaggtaaaggtagtagctttaccgtgcaagtggcctgtcatttaaaccctgaacaattacaacgtaatgcgtttattcacaactatgaacaactgtctccgggttcagatacacaattatccttcgcagaaaatagttttgatgctcatattttagtggctgaggataatccagataatcaattattgataaaactattgctacaaacttgggggctcgagcctgacattgcgaaaaacggcgctgaagccgtagaaatggctctggttaatgactatcagttgattatcatggatatgcaaatgccagtaatgggtggattagaagcaacgcaaatgctccgtcatgctgcatacgatggccctatcatagccttaacagcaaacgttatgaaaaatgacgttgatacttatttagaagctggttgcgatgaggcgctggctaaaccaatcgataaacacgctctcgagaaagtactagttagctacttgaatattgaaaaagacagtcaaaataaatgggaaaacttactgaaaagtgagaaattccaacagatcaatgataactaccgttctaaactacctgattatttaagccaagtagtacgactgtatcgtgcaaaagagtgggaggccttacgctctcttgcacacagtattaaaggcagcgcagggtgttttagctttgaagaaatccacaaaacggcaggtcaactagaaacggcattgagcacgaaccaaatggcacaagttgcagactgttatgaagcactcattagtgctctaaaagaggccgcttaactaaagccttaaagttagccccatcaaaatagcatcttcattacctgtcgcagttgggtagtaatttttacgcactgacattgagctaaagcctgcactctcgtacaaaccaattgcaggtttgtttgattctcgcacttctaaaaataagttctctgcttggtattgctcaccatgctcaataaatgcatttaataattgttttgcaataccctgcccttgatacgctggcgctacacaaatatccattagagtaaagtcaggccctgcttgttcaccgatgtaaaagccaagcatttcatcatcactaaaggctgcaaggttaaaatagcgaccagctaaacacgacagcatggtcttttctgtccacggatgactatgacaggcattttcaatagccattaactggctaatataggttgcatctacaggtttaaagcttatcaagttgttcaccaattaaagaccaaagttgtttcttctgctcagctgtgagcttctcactcggcaaggctaaacagccatcctgccagctaatattctcagcttttactacctgtgtgatcactattggagcaaacgctttttcaaggtcttgatgtagctgcagtggaagtactaaaggtgcttgtgctgttacagtgacttgttcatcctgagtttcaggcacagttcgataatgttgttttaactcgagtgattgtacagagaatatcgcagcgtaacttggattcataacaactcaatcatgattaagagcaagtaatataggaagatttgcgattaaagtaaagcaggaagaaatggcaggggcggagagattcgaactcccaaccgtcggttttggagaccgctgttctaccaattggaactacgcccctgcaatgacgacgaattatatagagcttttttcaaaggtaaagtaaaaaaacacagtttttagtttaactgcttcttaaataaacaaaacggcgaattagcatgctaattcgccgtgttgattattttgcgactcgtcgctttgaatattgaaatgcacaaggcatgagaaaataggaagccattaattaactaaaattaaagccaatgttacttattcgcaatttattgagtaccaacagtgaccgcccttgaaaaaggaacatgtgatgaccactttaaccttatgattaatagacacagtaatcacatttcatattcatgctattcataaataacaactgaataagcaaatacaaaaaataggtaccagcaggagggattcagcctcccctactttgctcagaaaaattgggggtgaggccatcctatggcattctgctgaaaacaacattgagaggttaaaatgagccaattatttagtgccgcgaagatcggagagctcaatcttacaaaccacatagttatcgcaccaatgtgtcaatactccgccgaatctggacaggctagttcctggcaccgcatgcactatggttcgctggcaacgtctggcgctgggttgctaattttggaggccacagctgttgaacctattggccgtatttctgcgggagatttaggactgtgggatgacgcaacagaagccgcattagacagtgttttgtctgatgttcgcgcttggtctcccattcgtataggtattcagcttggtcatgccgggcgaaaggcttcttgtcatgtgccatggcagggaggtcataaattgacgatggatgaaggtggctggcaaacggttgctccttctgcgttgggcttcaatgagcaagacgaaacgccagagtcactcgacttagcgggtcttgcgcgtattaaacaagcgtttgttgacagcgcaattcgtgcagtacgtgtaggaattgatctaatagaaatccatgcggcgcatggttacctactccaccaatttctttctccactaagtaaccaaaggcaggaccaatatggtggttcgctagaaaatcgcctacgctttcctcttgaagtatttgaagctgtgcgtaaagccatcccttcttcagtccctgttggagttcgtctctcagcaactgactgggttgatgacggttgggatgttgagcaatcgattgtgtttggtcagcaactagaacagctgggttgtgactatctgcatgtttccagtggtgggctttcgccgcagcaatccattgatgtaaaaccagggtatcagcttccgtttgctagtgccattcgccaacaagttacaataccggtaataggtgtaggcttaatcaccgagccacagcaggctgaagaagcgctgaaacaaggggatgccgatttggttgcattaggtcgctctgtactttttaatccgcattggccttggcaagctgccgttgcgctaggtgctcaggttcaggctccgcctcaatatttgcgttctgaaccacatggctcgaaaggtacgcttgtttaaccttaaatatttaacaggctgactacaacgcgcacaaaattcaaacggtgggctatcgatacttctccattttctttgcgccaagatggaaactgttatgaagtatctgcagctcaccaataaaactcgtactgtgccacatattctgtgtaatcgaagactaaatagctattggtgctaactcattaaccgtcacatttgtcacgagagtttaagcttcatggctgacaaaagtgttaacaggaagaccttgtcacttaatcacaaactcttatcagcacaaatgtgtgctgtgttcagcctctttggttggctatttactcagatttggcacgcttatgcagagttagagctgttgtcgatttctggatatgctgatttctgaaaacctacagtcattatccctataaaaaatgccagtcagaaaactgactggcatttttattggcttgaggctttatgcgctattgctagccagccctactcccattcgattgttgccggtggcttacctgaaatatcgtaaacaacacgtgagataccatcgatttcgttgatgatacggttagaaaccacacctaagaactcataaggtaagtgtgaccaacgtgccgtcataaagtcgattgtttcaacacaacgcagtgatacaacccagtcgtatttacgcgcatcacccattacacctaccgatttaactggtaagaatacagtgaatgcttggcttactttatggtaaagctcagctttgtgtagctcttcgatgaagatagcatctgcgcgacgtagtaagtcacagtactctttcttgatttcaccaagaacacgaacacctaaaccaggacccgggaatgggtgacggtaaagcatgtcgtaaggtagaccaagctcaaggccaattttacgtacttcatctttgaatagctcacgtaatggctctacaagacccatttccatgtcgtctggtaaaccacctacgttgtggtgagatttgattacgtgtgctttgcctgttgctgatgcagcagattcgattacgtctgggtagatagtaccttgacctaaccatttagcgcttttcagctttttagcttgctcgtcaaatactttaatgaaagtatgaccaatcgctttacgcttatcttctgggtctgacttgccagctaagtctgctaagaattgatcttcagcatcgactttaacaatgtttaggccaaacttgttgccaaacatgtccataacttgctgaccttcgtttaaacgaagtagaccgttatcaacgaatacacacgttagcttgtcgccgattgcacggtgaataagcatagcaacaacagatgaatcaacaccacctgataagcctaagataacttcgtcatcacccacagtttctttaatacgctcgatagcatcatcgatgattttagctggtgtccatagcttttcgcagccacagatatcaattgcaaaacgctcaagtaaacgttgaccttgatgagtgtgagttacttctgggtggaactgtacgccgtagaaacgcttttcttcccaagacattgcagcatgtggacatgttgatgttttagcagtagttttgaaagtatctggaatttccattactttatcgccgtggctcatccaaacgtctagtacgccagcaccgccgtcagtaatgtggtcttcgatagcatcgaataacgcacagttacctactttctcaacttgcgcataaccaaactctttcttatcagagctgtgtacgctaccacccagttgcgttgccattgtttgcataccgtaacagataccaagtactggaacgcctgcgttgaatacatactcaggagcacgtgggctgttttcaagtgttgtagactcagggccacccgacaaaataataccttgtggattaaattcgcggatttgctcttcagttacatcccatgcccatagctcacagtaaacaccaatctcacgtatacgacgtgcgattaactgtgtgtattgcgaaccaaaatctaaaatgagaattcgtgaatcgtgaatgtctttgctcatggagtatctcgttagtcaggaactgctcccaaaaagggagatgatcaataaattagggctagcaaatgctagcccatgtaatttcaataccttaaggtaattaacctaagcggtagtttggcgcttctttggtaatttgcacgtcgtgaacgtgtgactcacccataccagctgaagtaacgcgaacaaattgaggtttagtatttaactcttcaattgttgcacagcccgttaagcccattgcgctgcgaagaccgcccacctgttggtgaataattgtcgcgataggacctttataagcaacacggccttcgataccttcaggaacaagcttgtctgcttcgttcgatttttggaagtaacggtctgatgaaccttctttttggttcatagcgccaaggctacccataccacggtaagacttgtagtaacgaccttggtatagctcaacttcacccggagcttcttcagtacccgctaacattgaacccaccattacacatgatgcaccggcaacaagtgcttttacgatgtcaccagagaaacgaataccaccgtcagcgataacaggaatatcgcggccttttaagccttcaactgcgtcagaaatagccgtaatttgtggtacaccacaacctgttacgatacgagtagtacaaatagaaccagggccaatacctaccttaacagcgtcaacacctgcatcagcaagggcaatcgcaccttcagctgttgcaacgttacctgctacgatttgtaaatctgggtatgtttgacgtgtttgagcaacacggtcgattacaccttgtgagtggccatgtgatgtatcgataagtaatacgtcaacacccgcttcaacaagggctgcgatacgctcgtcagtaccaggaccaacaccaacagcggcacctacacgaagacgaccttgctcatctttacatgcgtgtggcttgtcttgtgctttttggtaatcttttacagtgatcatgccttttaatttaaatgcatcatcaacaacaagaattttttcgatacggtgctcgtgcattagacctaaaatctcatcacggtctgcaccttcttttacagtaactaacgattcttttttcgtcattactgtagaaactggctgttcaagcttagtttcaaaacgcatatcacggcttgtaacaatacctacaaggttattgtcagcatcggttacagggaaacctgaaaaacctttttcttctgaaagcgcgatagcatcagcaattgtaagatccgcagtcacagtaacagggaaagaaacaatacctgcttcgtacgtttttactttgcgtacgtttttagcttgctcttcaattgtcatgtttttgtggatgaaacctaacccgccttcttgcgctaaagcaatcgctaagcgagcttctgtaacagtatccatagatgctgaaactagcggcaagttaagattgataccacgcgttaaacgagttgaaatatttgccgtgtgtggcaaaacagtagaatgacctggtactaaaagtacgtcgtcaaaggtaagagcttctttagcgattcttagcatagtgcaacttctcacatgtggatctgagtataaggaattgcggccaaattttatcagcgttgtcggcacgagtaaataaaattattcatttatttgtgttaaagtacacacagatttttttactggggtttttaatggctttcacgcaatcaacacagcctgtttatacagtctcgcgactaaataaagaaattcgtcatgttttagagcaaggcttttcgtcgctggtattaaacggcgaaatttctaactttattgccccagcctcaggacattggtacttcactttaaaagacgaccgagcacaagtaaaagcagcgatgtggcgtggcaataatcgcggtcaaacgttccgcccgagcaatggtgcacaagtgaccgttcgcgctcgcgtgtcattgtatgagccccgcggtgattatcagctgattgttgaacacatggcccctgccggtgaaggcttattaaaacaagaatttgacgcccttaaaatgcgcttagctgcagaaggtctatttagctcagcccacaaaaagccattaccaaccaatataaatcgtgttggggtgatcacctctgccacaggggctgctattcgcgatattcttactgtattaaaacgccgcgctccgcagcttgaagtcgtgatttacccagcaatggtgcaaggtgcagatgcccatagccaactaatagaaaaaataaacatcgccaaccagcgtaacgaagtagatgttcttatattaggtcgcggtggtggctcactcgaagatttgtggtgctttaaccatgagcaattggctcgtgccatttttgcaagtcacttacccatcgttagcgccgttggtcacgaggtcgataccacgattagtgattatgtcgccgatattcgcgcagccactccttcagctgctgcggagcttgttagcccaaacagcgaagagctgcacaacaaagttaagcagttagttagacacttaaatcatgcctttaaacattcattggcagtaaaacgcagtaccgcaacgcaatttgagcaccgcttacagctttgtcatccgcgtaatcaactcaatcaacaagcgcaaaaattagatgagctaagtttagccttacacggcgcgatgaatagtaaaattcagcgatatgagcgagtacttgctaacttaacaccacgcttaatgcaacgttctcctgaaaagcagttagctaagagcgagcatcagctggcgcaattacatgctaggcttacacaggcaatgcaacaacagctttcaggttctcgaaacaagctttcattacaggcgagtcgtttagattctgtgagcccgctcagtgtgttggcgcgtggttacagcattactaaaaaccaacaaggtggggtggtgaaatcggttaacgatgtaagttctggtgagcttataactactgaacttgccgatggtcaactgcaatcaaaagttgtataaaattactccgtgcttgcaataatggttaggctatcgtcacttgaggtggtggaagtaaatttaaattgcttccaccagctttgctccaccattttatcggtcatgttacgccaataatggcttggcaactcatcaaccccctctggttgcagcagtttaaactgacaaactgagcttttgcatctagagatactcaattctggctgcacgggtaagtctgccataattaaaaagtcgctcatggctgtttcaatttggtaagcccacgcctcatctcgagattgctcttctaataaagtataaagatcctctagatgtgagttgatttgctgcggaggtatcgcacttgaacggtaactggcaatcaccgcttgttggttttcgacttgtaacttcagctctgcgacttgtaacttcagctctgcgacttgttgctcaagctcgcttttgctaacagctactgaattaacttcagcgacttgttttttaataacaggcgctacagcagtggcttgctgctcaggggcttccattgtttgcatttcaacaaattcttgctgataagtttgcggctgatgctgtgggtcaggttgaaaaaatgacatggttacagcgccacaaataaatgacgctataacagctaatccaaaagataatttagacaattccattgcactttattggtgtaaaactacaacatagcactggtgtgcgatgcattactagcggtagtcgtaccatcatctaaaaagttttggttcatgctttctgctgggcaagggcagcttggtttacccacaactttagctggtacaccaacaaccgtagtgtgtgctggaaccgcactcagcaccacagaattggcaccaatacgcgccccctcacctacttcgatgttacccagtacttttgcacccgcgccaattaatacgccggcacgaattttagggtggcgatcaccttgctcgttacctgtaccacctaaggttactgattgaagaatcgatacgttatcttcgataaccgctgtttcaccaattacaatcccagttgcatggtcaaacataataccatggccaactttacaagcaggatggatatcaacgccaaaaacctctgaggttctactttgaatgaagcgagcaagctcttttcggttttgttgccataagcagtttgcgagtcgatgagcctgaattgcatggaagccttttaaattaagaatgacagttaagtaactatcggctgcagggtcgcgatctttaactgcttttatgtcatgagcaacatgcgttagcattaagtcacatttaacaaaggcttggtcgaataattcacgaatagtaaacgccgaaaccaccgcatcagcgagtttattagcaacaataaaactcagcgctgaacctaaacattcatgatttaacacacacgaataaacgtgacttgctaaaagcggttcacgggaaacgacttcgtttgcttcttcacggagcttttgccaaatttcatgacgcataatattgcctttctggttgtacctaactgctaaggcttaagtttaacggatttgtagcaagatgtactaacccgttgtttatttgttctggttatatctaataaccagagtagcaaaaccactttttgctcattttaagggagttttaaggctatctcatatgacagaagcaaactcagagctgaagccaacagttaaattaaacttcttatatttcaataacaaaacagatatgacatcttacctgtcatatgccaaaataggcactggcatatcgctgacggcgtaaaaaacaaaaataatcattaaatttacatcatcaacttaacaaggaaacgatgatgaaaaacgacgtactaaactcacataaactaggttataaattttactttcaagatggtgataaccaaatcgcatgctttggtcacatcatgagcggtaaagaacaaatatatgtaaacgacgaattggttagtgaaaagcgcagcttcggctttaaaagtcatcacgactttaactaccaagatactgcttatgctgtcgattttgagatgcaaaatatactcacaggcaagcttgaatgttcgttttacaaagctggtaaattagtaaaacaaagcacacaaaccgcgcttaatgataacccaaaacaagtggctatggttaccttaggctgttttattggtggtgcaatatttggttacgcagtcgttactttcattgaaccgtttcttgggaagtaactgatgcagctgaatcccaatacaatcaagacgcttagacttaaattcgattggacgcagcagcaattggccgatgcctgtgatgtaagcctacgtaccattcagcgagttgaaaaagaaggtgcggcatcaaaagaaaccaccatgagcctatgcgctgtgtttgaagtacgccaaggtgagctaattaaactcgatgacgatgtatctgaacaaagcgcaacacacgcagtgagtaagcaaaatctcgctgcaatcgtagcggcttcttcgtttattagttttgctcttggtatggcgacggtattagttattttttaggagcagccaatgaccaaggaacaacgtggctatgcaacacttatagccttcatgaaagtagcaatattgtgtggcattgccgtgaaaattgcctctttattttaataagttctctgtcagagttgagcctcgggcttgattctgacacgaagctgcatcccaaaacgacgtaattttctaaaatacgttttgccaccttcctcgctattatcagacgtatccatatattcttaaaaagcagcagcacagaaaagctagccatttaggattattttttacgaccataacagtgaaaacttatcatttgttgctaatcttacataagtggtattggctgggtaataatgtggttgagtcaaaagaattcttaaaattaatactcgatagcatctctgagcatatcgtagttatcaatgaactaggtgatatcatctttgttaatcgcagttggcagacttttggccaagataataattgcagttgtgacgtgcagtggcgccaacaaaactatttagcaatttgtgaatcagctgcaaaacaaggtgatgaatttggtataaaagcactcgcaggtctacaaaaagtcatcaacagtcaacagcaagaatactatttagaatacccttgccacagtgatactgaaagccgctggtttttgatgcgtgcagtaccactagaatatcaatcacagcgctatgtcgttattagccacttaaacattactgaaagaatgcgagcagaacagcaattaaaaatgctcgctcacattgacggccttacacaacttgcgaatcgtcgccatttcgacaatttctttgaacaagaatggagtcgctgtttacgtttaaaacagcccatttctattgccatgattgatcttgaccatttcaagttgcttaatgataactttggccatttagtcggcgatatttgcttaaaaagtctagcaaacttgcttacacaatttgcccgcagacccagtgatttatgtgcaagatacgggggagaagaatttgtattagttttgggtaacacacatagcgagcaggcctatcaactactctctcggtttatgacgcaattaaccgagctacatattgaagagttgcataatcaacaactaaccgtaagtattggtttagcaactttagtgcctggttttttagacaatgcgaccacgttaattgacatggctgacaaagcgctttatcaagcaaaagaaacaggtcgaaacaagctagttgttgcacaaacacaaactgacattgtgagcaaaatgcccctaactaggggcattgaatagcggttattggaataccttttcaacatcaagtacgctgatattttttgcaggtatcgcaagtttatagtcagcaatcagtttgtcttcagcaacaagctctgctggtttttcagcgttatacaccataggtgatgtttgctctgaggctaggcgtttttgcatgtctttgccatcaccggtaataaacacatagtgaatattctcagtttgcaggttatcgcgaataacacggttaacatcatcaagggttagcttttcaagcttgccgcgcacatagtcaacaaagctctcagtgttgtagaactcactatcaagcgcatagcctaattggcgatcttggcttgcaaccatttgtggcacaaagttaattaagaagttacgagtcgcttcaaaatcttctttgctgatgccatttttaattagcttatcaagctcaaataacgctgtacgcgttgcaaagtgcgcatcgttgttagaacgaagcggacgtaaccatacttggaaaatttgctctgaacgacctaaattagcatcaggttttgtttggaacataccacgcgggaagtactcaatatacgcgtagtcaccatagttcataccacgtgtttgacgaatgcgctgatacaagaagctgtttgagctgcggtgttcgccaaagtaagagcgaactaaccaaagcgctgtccagtcatcgctgctacgaatagtatcgattgggaaaccaaatgatacagcggtagattgcgctgatttttcaacaatagtcgcatgatgaccctttagcgctggtgcatctgggatcattaagcggctttctttaccttgtggaagcgatgttaaatctttcatcattgctgatttaacttcacttggaatagcaccaattaaaccaaccgttaattttgattgagtaaactgcttagcataaaacgctttcacatcgtcaagtgtcaacgcttcaaggtctgataaatcaccatagttatagctttcgtatgggtgacctttataaagctgatgataaagcacttctttacctaactcttcctcatttgatgctttaaggcctgctttaatgctatcgataagctcttttttcagacgcttgaaatcatcttctctaaagccagggtttaacatctgatcgctaacaagtgcataccacttcgctgcattgtctttgtgcacacgaccacgtagtgaaatcatttctttatcgatttgatacccaaagcttcccgccaatgggtataaggctttttgaatatctttatagctcatagtttctgagccaccttgcgctaacatcgcagcagtgagtgcagctaaaccttttttcccttgtggatcagctgctgcaccggtattaaataaccagttaacatcaactaaaggtgagctattggttttatcaagtactttaaagtgacgttctgttggggcttgttcaatacttgcaaccagcgcgtttaaatcaacctcttgttcaaaaccagccactttatcaagcgccgacattgtcacagtagtgcggcttgaatcaacaaaatacttgtttgctaccgctttgatatcttcaggagtgatgctatcagcaattgcgtacagttggttaataacctcagggtcgcgctcaaaatgcatgtagcttgcaagcgttgacgcaattgactgcgatgaatcaagaccattaataaagctgtattttaggtttgatttcaaatccgctaacttttgtgcatcaactaactcagtacgtgcttgtgcataagtacggttaatcgcatcacgggctttagcaaggtccgcttcgttttcgacttttacaaacacatgtaataaacccggatctttagtatctgggttataggtaaacatttgactagcaatttgtttatcaacaacaagctcttgataaagtgccgagttgttagagaaataaagctgcgagattaaatcaagggctgcacggtctttttgggtaggatcccatgccgtgcctttataagacacaagcaaccagtgacctggtaaaccatcatttttttcatgtacatattttgcagcttgttgttttggctcaacaggaatatctgcttggtaatcgccctttttccagttaccccaatgctttttcaccattgccatggtttcttgtggatcaacatcaccaacaatgactaaagatacatactcaggtttataaaatttagcgaagaactctttaccatatgccatttgatcaggcatagcttcaatgtcttcaaaaaagcccatcgtggtatgcttatacgtgtgcttctcgaatgcttcgttacgaacagcagaaagtaacttgcgaattgggctggcattattctttagatactcacctttaacagtaagcgcttcagtgcggaactgttcttcactgtatgtgaggttttggaaaatatcggcttcgatttcgagtactttgtctaagtgctcttttgaaaagtttaagtgatagttagtgtaatcgttggtcgtgtacgcgcgattatcaacacctgaattctttaaaatatctgaatacacatcttgcgggaatttttcagagcctttaaacatcatatgctcaaagaagtgtgcaaaaccggttttacctgcttcaacttcgttacgtgaacctaccgataccggaatttgcagtgaaactacatctgggtaatcggtttttaccaccatcacgcgaaggccattatcaagctcttctaaaaggtagtcttggctgaatacacgactatcgtcttggcttgctagctgctcaatttcgacttctttaaccatagttgactgtgaattactcgcgcagccacttagtgctagcgttacagcaacactggttgctagtaatctaaatttcataatgttcccttgttagttatttttttcatgatcattgctgattgattatgcatcaaagtgccagaaaatatgagagccagtgcaataatttatgtaaacaggtgtgtcaatttagcgaaacgctcggctttcaatatgagtaaaattcatagtcattgaaaaactttcatgaaaaaaatctatctagacgtctaaatggctgctatattgtttgtcatagacatgagcacgagctggaatgaggattatggctttatcactacaagagaaaattgaagacaccaatcaaggcgtctacctaattggtactacaccaccaaaatcaggcacagataaagccacattagaaactattgcgcagaagcttcttggtcgtttacacgaaattgaatacgatggtgtaatcatttatgacattcaagatgaaagcagccgtacagcgattccgcgccctttcccattcaaagagactgtcgacccgcgtgagtattctaagttattacgtaacttatctcagcaagatgttatcacctataaaagtgttgcccagcgtggcgaagctgaatttaccgaatggctaaacgaaactcgtaatgagtttgagttaaaaaacttagtgctagtcggtagtccatcatctgatggtgatatcaaattaagcctacctgatgcatacaaaaccttagcagagcaagatagtgatgtatttttaggtggtgttacgattgctgagcgccatgcgagcaagcgaaatgagcatgaaagactacttaaaaaaacacagcaaggctgtcaattttttatttcgcaagccgtctataatgcccaagcgacaatcgacttgatcaccagttatgctcgtagctgtaaagcacaaggctcaataccaaaacgcattattttaacgtttaccccttgtggtggtgaaaaaactttagagtttatggaatggttgggtatttctgtacctgaggcaactaagtaccgtatgctcgatgctgcaaatactttaagcgaatcagtgcgcatctgccgtgaaaatctcgacttaattttacaaagctgcgcacatttagatgtaccgctaggtttaaatattgagagcttaactaaccgtaaagaagaaattgatgcatcaatcaatctttaccgtttactaaaagcaatcatggaattaaacctagctgagaagcaaatagcttagcgtgccgccttcgaggcttgctttttctcatacatatcttcatctgcccgctttaatagctcagcaaagttttcttttggctgagctattacccctgaaccaatacttaagctcgtgacaggaatgccccgcttctctaaatttatctgaaaagcggtattaagcttatcagcgatactgtctatgcaatcaccgggctgaacttgcaataaggcaataaactcatcaccgcctaagcgaccgataatatcggtttcacgtaggcattctttcatggtgtcggctaaacaaatcagtgcgagatcgcccacttcatggccatacgtatcattgagtggtttaaagctatttatatcgataaataaacaactaatatcaaaaccaagacgcttcgatatattcaatttatgttggcaaagtaggtctattgcacggcggttataaatattagtgagtgaatcaagcatggcaatttcacgcatctgtgtgaagttgtctaaaagcgcaaggtcatcttcgaccatatcgcgaagctgttctatcaattctaaaaagctctgttgataatgggtttgtttaaaatccattacgcaaaaagtaccaaacgggtcaccacttggccagctaataggcaccccaagataagactcaaagccatcttttactagcgggcagtcatcccattgctggtcttgactagcatgatcaacatacagcggtgccatgtcacgcagtacttttttacagaaaatattatcgtcagcacttaactcggcccccgcctcataggggttttcttgctgctcactggagacgataatgcgataaacattatcagttttgtggactataaagcccgcgggtgcagaaaacagctcagtcatgagatctattgttttctgccactttgctaaggagaattgcttatcagcgcggcgaaacgtccatttattctcttctaacatactaaactctcatctttagccagaggatagtataaatatacgccaaatttaggaacgtctcctacttttttgccctaaaatacgttttttatcgcgggaacgtcgtgctttattcgtatttttacgaacctgttttggctcttttgttaagtccggctcataacctggtaaccactgcggcgtgagccttgtgtcgagcaatatatctatctcgtccagtaaccactgctcatctatgctaactaatgacatcgcaacgcctttttcgcctgcacgccctgtgcgaccaatgcgatgtacgtaatcctcagctacataaggcaactcatagttaatcacatactttagtgaagcaatatcaagaccacgcgccgcaacatccgttgctaccagcacccttgttgcacctgatttaaagttttgtagtgctttatcacgcgctccttggcttttatcaccatggatagactctgtttttaagccatctttacacatttctttagcgagcaaatcagctgtttgtttagtgcgagtgaagatcagtacttgctgccaatttttcatgccaatcatatgagaaactaactctcgcttacgatcttcatcaactgcataaactagctgctcaatttcaaccgcagctgagttacgcttattcacttcaactaatttaggatcattcaataactgcttactgagtttaaaaacactgtcatcaaatgtggctgaaaaaagtaaggtttggcgctcttttggcacatgacgcaaaatgcgtttaatctcatcaataaaacccatatcaagcatgcgatcagcttcatcaaataccaaggtgctaatacttgagagtttaatactgcctttgatcaggtgatcaagtaagcgccctggtgttgcaactacaacctgcgcccctttaatggctttaatttgcggaccaatactagccccgccataagcaagcgcggctttgatatcagtgtgcgcagcgtagcgctctacgcttgcaaaaacttgttgggcaagttcgcgggttggcgtaagaataagcactttgacggcacttggtagcgcttctaaggacaatagcttatctaataaaggcaaaacaaatgctgctgttttaccagtacccgtttgtgcgctgcccattacatcagcaccagccaaaataagaggaatagtttgcgcttgaatagccgttggggtgtgataattttcggcttgcaatgcttctaaaagcgctggtgcaagatttaactctgaaaaggtcgctgctgacatgatatgaggtacgtttactataaaagcgctattgtacgcttaacacaataaacaaaaaaggcgcaattagcgccttttctatcaaccgaaaaaatcacactggttttaatgattctttgcgctgattgtaaaaactaattaaatcatcaacggttgcttggcaatagtcacgaatgccagaaacaagcatgtgcttttcacctgaacctactttctcgccattttctaacaagttgaagcggagcgtaattttgccgcgcttacctgaaaattcaaaatcaggctcagcaaactgcagttcaggtgagctgatatctaggcggtcaaggttgattagcattgactcgtaaatcaccattgggcgcgcggggttaatcatcacgtcttgcttacccattagtggaatgatcacatgcgggaaagtggtgccagaaaactcaacataatttttaattaagctatttgttaactcagtgcactggctaacagccccttctcgtttcacttttagcatgactttttcgccatcagtaatagcaaactcatcagcaccttcagggaaagtgagctttgaattttcatcaaccataccagcaaatgtgaattccattttttcacttatgccataacggtttaaaaccagcgaaaaaagtaaatcgcccggtacacaaaactttttagcgtctttatcgtgtaatggattgaaatcatcagccactaacttggcgaaacgacagccttgctcacgcgagattgaaacataatcagcatgttgctgataataaggacttaacatatttgttcactgcttaaactacttataacctgcctatactaccagaaaaaaaataaagagaggtcgaatctgttaaaattaagcaaagttactgataataagaacgcaaattttagcactgcaacattgtatcaatttgtagcaagtgattaacaaatccatgcgaataataaagacttcccctcacaagcctgtagtgaaaaactattaacttaaactagataaacattcacttctcttgataaaacaacacactaatgaatcaaaataaatgactcaatctgacaagctgaatacatctaaagccgttgatcccgctatttgtagctcaaagaataaataaggtatgataattgtgttttttatcgtgtaatcaccatttaggttgtataaataataattataataagcggcaaagataattactcaaatgagtgctagttggttacatcaacgttcgacggttaatgttactttgaaaaaaagacttttaaaaatcagagatgtgcgtaaatgatcaaacgattatatttggcattgctgcttttgtgtttctttttttcgtcgctgtgtttgagtgaagagttttctaatcagcctttttttaaagtatctcccaccgtttgtgtcactgaagcaaaacaaaaagcatgtgaattcaaaatacaagttcattttcgcatcgccccttttgatgagttatgtttagaagtaactcaacgccctcagtacacccagtgctacacacaaaatggcctaattgttgaacagctcaatattaaaacaaagcacccactgactattaaattagtaaacccactgagcaatcagattgtaaaaaaacaactactttcaatagcaaattacgaagctaaagattaccgcataaaacggcgttttggctggagtttataatgcagcatatttttttaattgaagatgatgtgaaactagcaagtttaattcaaaagtttttactaaaacatggctacaccatagatgtgtttaatactgctgaggcttatcgcaacagcgacatcaccttcatgccttcactcatcatatgtgatgttatgctaccggatggcaatggctttgagttaatttctcagttgaaagaaaagtacagttgtcctgtcatttttctaacagcactggattctgtgcaatcacaaattaaaggcctagatctcggagcctacgactatcttgtcaagcctattaaacctgagctattgctggcaaaaataaaaacaatcatagctcataccatcggccaagatagcttttcaaatgagtatgacctacttcggattgactcaaagaaaagagatatcttttttaaaggtaaagcactcaacctaaacgatagtgaattcgagatcattgcttatttggctaaaaacagtccgcaacctgtttcccgtgaagttttatttaaacatgtcattggtcgtgaatacgacgggttagaccgtgctattgaccttaaaatcagccgcttaagaaagaaactaaaagaaacgattagcgagcataaagagtcgcttgatataaaatcagttagaggtaaaggttacagcttggatatctcgcattaatgaagcagcagttttttaaattatatttaatcatcacaatgagtctaatcgctttagttcttgcgtttgggcagctgtataatgaatttttttctgagcatgagccgagtatacaactcagcgtccatgagcttacacaaatcgccgaacataaagattcacggatcagcaccttaaaccaaaatgagttagtgttaccaagttctttacaaactactttcgaaaacgatggcattattagtgtggtcgaaaataatcaacagtttgtgtatctcaaaggcagcaatggaactatccaaaaagtaggcccgatcactttgatttcgcagaccaaaacagactggtttgcgttctttgctttttacctattgctcggcgctatgatcctagtgtttattcgccccgtgtttcgtgatttaagctcgttacagcgcgcagcgtaccaattcagtaaaaaaccgcagcggatcgagcttgatattaagcctaactcgtcgattgcaccgcttgctagtacctttactcacatgtctgaacgcattaacaaattcgttcagcttcataatgatttatcacgtattatttctcatgaaattcgcactccccttacacgtatgcggtttgctttatccattgctgacgtagaaccagagcaaagtagccaaatagaacgcgatatcgatgagattgaactgcgtttggagcagtatttatcgtttgctcgcttagagcatcaacaaagtgtatttaatcaagataaagttgatttaactaagctaatcaattgtgaaattgctaagttcgatttgtataaagagctccaatttattgcaaagttaaaaatagatactgcatattgtgaagcgagctttatggctattgcagtgcaaaatttactgatcaacgccacaaaatacgcaaaacacactatccaaataagtagtgaagaacaagcagcccattactctataagcattacagatgatggccccggcttaccaataaatgccgatgccttaatagagccttttaaacaaggtgaaggtgataagctggccagtggttatggattaggactttatatagtccatcgtatcgctagctggcatggcggtaaaattagcttagctaatagctcagaaactggcggggcgaggatcactattcgctggcctaaaagtggtaagtaatcccagtaaaacctgaaaaatagccatttttatggatcatcgttgaattagctaagttactatcaagccaagtgtgctttaatttgaaatctaaacttagactatcgttaattgggtattcgtagctaatttttacgtaataattgatggcactttgtaagtcataatcaaatacacgggttttactttctgtaggtgcaactgtgtagtagtaatcaatgagctcttcatttttataagtaaggcccatttcaacacccgcgactcctgaaagcagctcaaatgcctgataaccattaaacaaaatttcgtagccattatgcacagcggttacatcatgcacatatgctgcgctaagccagatgttatcgtatacattcaatgcagatgataagcccgccatgtatgatagatcacgtttaattggcgttaaatttataggtgaagcggtaggaatggtaggtcggccactgtttgatcttatcacacccacagcatagagcttatctatgccatctaattcaaagaaaaagccatcatcgttaaatcggccaagtaaatcaacgtaaaaactctctgtttcgattaagctgtaacctatagaaaaatcgtcgaaataccaattatcaccatagtaagcaaagctaggtaaaataggtgaagtaatatcatcagcatcaagaacagggttttcgattcccccatagcccagagtaatgctggcatgaattgtcgactttttaattaattgcggctgtttatcatcaacctgcgcaaacgcagttgatgcagttaaacaacatactaagccaaacaatttattcattaacttgattcacctcgataccataattaaaaacagttatggcaactatataatactaacaatagcctactcttaacgcttacaggtgcgatcatatcgtttgcctacatttttgtataattattttccagtctacactgttaaaaatagcttatgatcccctatcaattaaatctaacatattgaatgaaatataaaatagtatgtacattttgctacattggttttcagtttttagttattgattttggttatttcagtagccaaatatgagagctaacttccaaacctgttttgtaaaaggtattacatttaactcagcttgcttaaaaaccatctaacctgtcaatcaaacataaaaaaaccgagcataaagctcggtttttgaaagttatattacgattaagcttgcggataatcgcgataggcacgttcgatgtttttcgcttgctttttagacacaccaatatgtgctaatgctacacgtaaacgagcacgtgaaaggtctgaacctaaaatttccattgcatcaagtactgatgttgaagatgtcttacctgtaatagccacgaaaattggctcaaggaagtctttaatcttcaactcatggaaagtcgcaacttcttttgcgatagcaaaaatcgctggtttttcccaactgcgtaaaccttctaattgccagatgaagaactgtaatgcttgacggattacatcttcatcagctttacccgctgttaatagcgcaggatcatagcttggaatgccacccacgaagtgaccggcaaggtcaaccatgtcagaaagcgtattaattcgcgtttttgcttctggcaatactttggcgaatagctcagtattaaatttccaatcaacaaaacgttgcattaattctgcatcagataagttttcacggatccacataccgtttaaccagctaagcttatcgatgtcgaaaatagggccgccaagcgacacacgcttcatatcgaagtgctcaatcatctcatctaaagtgaacttttcacgctcatctggcattgaccaacccatacggcctaaatagtttaatagtgcctctggtaggtaacccatttctttatagtagttgattgaagttgggtttttacgcttcgataattttgacttatctggattacgaagaagcggtaagtgaccaagtacaggcgcttcccaaccaaagtcttcatataattttaatagcttaggcgctgagttgatccactcttcaccacggaaaatgtggctaatttgcatgtggtgatcatcaacaacgttggcaaggaagtaagttgggaaaccgtcggccttaagtagcacttgcatgtctacattttcccatgggatctcaatgtcgccacgtaggtagtcgttaaacttaaacgtgccttcgcttgggatcttcatacgaattacgtaaggtttacccgcttcaaggtttgctttaatttcatcttcagaaagatttaaaccacgaccatcgtatttagggcgcagaccttcggccatttgctcttcacgcatttggtctagttcttcgctcgtagcaaaacagtaaaaagctttaccctgttcaactaactgatgcgcgaatttcttatataaatcgctacgctcagactgacggtatggaccaaactcaccgccaacatcgggaccgtgatcccagtttaagcctaaccatttcaagctatccataatagcttgctctgattctggcgtactacgaacttggtctgtatcttcaatacgtaacacaaactcaccgccttgctgcttagcaaaacagtagttaaataatgcgatgtatgctgtacctaggtgcggatcacctgtcggtgacggagcaacacgggtgcgaattgtcatggttatatctctcaaaagacaattaaaaaatttgcccaaatgctagcacagcacgggctataatcgaagtgtaaagccgctttatgcagcgactttatctaaataagcaatgatatcgtttgattcatacaaccaagttacttggccgttttcttcaatacgtaaacaaggcactttgatttttccgccctgctctaaaagctcttggcgaaattgctcgttacttttggcatcacgagtttcaactgaaagaccttgacgcttaattgcacgacgaactttcacacaaaatgggcaggccttaaattgatataacttaaattgtgatgtcactgaatcaagcgccgcttgctcagcagctggacgctttttactacgtggcgtgaatacaaaatcaaaaaacaaaatgatgcggcctaacaaccaacgaacaaacttcatctcaccttctcatagggttctaaaaaatagtggccaattttaacacagcaagagacgctgcaacaggctaaaacagctctattgagtcatcactgcattgagaatctgggatatctaattcagaataggctgtaacacaatttctgcctttgttttttgagtgatacaaggcttgatcggctttttgcacaagactggcaaccatttcaaactcataaatcggcataaaaccgctactcacggttaagttacccacttgcgggaacgggtattcggcaacacatccgcgaaaacgattgagtgcattacgtgcatctaactcgtcgcttgcttgaaatagcactgcaaactcttcaccaccgtaacgaaacacgtaatcttcaatacgaaagttattttttaacagttgagcgactaacaaaatcacttcgtcaccgataacatgaccatagttgtcattcacttttttaaagtggtcaatgtcaactatagcaagataccattggcgatgatggggatctaattcgctttgtccttttacagtagttgatgcgatatcgatgacttttttatcaaaagtttgcctgttgagtaactcagtgaggggatccaattgtgatttataaagcagcgctagttggttggcataaatgttgagcatataaattgccaacatactacatctctctgacaactctttttctgactcaacaacaagcacgccaaccacattacccatgtaataaacaggtatgtaagtcgaaataaagccataatttcgacttatacgaattttgttacggctaaccttatcaataagttcattaacttcagactcagtaagctcttctatcaacgagtctttatttagtagacgggctgggaaaccgggtttgaagactttgttaatatagattgcatagcgcgaaaactcttccaattcgctcacagattttataagcgcctcgtcaagtccagcctcttcttcttgttgcgtaatttctacaacccagtcatgtccgcaagcgttagacgccatctataaagtccccaaaactatatataactttagtttagttaactttatcagaaatactaaaaaactataacaaaatcatatcatctctgtgaataacttcactgctcggcgcaaacgcaagtaactgggtgatttgcgatgaatggcaacctttaatttgatcaatttcttgatgattaaaattaacgagacctttagcaatacactggccttgactcgtcactacttcaatcacatcaccacgttcaaattgccctcgcactgtttttacgcctttagccaaaaggcttgcgccacgttctttaagcgcggcgcttgcgccatcatcaatcactaattgtccgctacttttaggcccagcaagaagccactttttacggccatcttttggtgcggtgagttttaaaaatcgtgtacctgggagcttatcggccatgcaatttaaaatcacatttttgccagcgcctttggcaataatgacttcaacaccggcgcgacgtgcaatatcggccgcttgcagtttggttgccatacctccggtacctagggttgtgccactgccaccagcgagctctctgagttcatcattaatatgcgtcacttcattgatgagtgtggcattcacatcagagcgcggatcaccggtaaataaaccttcttggtcagttagcagtaacagcttttctgcattcgctaaaattgcgactaaagcagataagttatcgttatcgccgactttaatttcggcggtggccacggcgtcgttctcgttaataattggtaccacattatgagcgagtagcgcatttaaggtatcgcgggcatttaagtaacgttcacggtcttctacatcggcgcgggtcaaaagcatttgcccaacattcacaccatacaaagcaaacagactctgccaaatatgaataagctgcccttggccgatagcggcaagcatttgtttttcaatcaaagaacgaccacagggagtaataagttgctcgcgacctgcggcaaccgcgccacttgatactaaaacaacctgataaccctgtttttttaattcacaacattggcgaacaagttcaaccatgtgtgctttatctaatttgtcggtaccgcctgttagcacgcttgtgcccagctttacaacaacgacgtgtggcctttgcatttgattcttatattctgtaattaaaatagagaatttatatataccagctaacagtttttgaacaagttaaaaaaattcatgctaggatcgcgctctcgtttttttactcaatagcgacacctatgccagccagtttatgcttaattattgcgacctttttatggggtagctcatacattgctttaaagcatgcaatcaatgtttatgatcccgtattagtcatttttttaagaatgctaaccacattattgattagcttatgtttatggcgctatgtgatccgctttgagttcaaacaaggtgactggaagtatttaattggtatgtcactggctgagccttgtttttattatttatttgaagggcatgctcttgaatatacttcggcatcgcaagctggggtaattgtctcttgtttaccaattatcgtcgctattttggcgttcttaatattaaaagagtacatcagtaaagccatcgtcgttggttttaccttgtgtattggtggcagtattttattaacgctattatcaccaagcacagagcaagcccctaacccactgctcggtaactttttagaattgatggcgatggtgtgcgccgccttttataccgtcagtgtaaagcacttagtgacccgctattcaccacttactttaattgcaattcaagggtttagtggtagtttgttctttgcgccttttttatttttcatcgaactacccagcgaaaatcagcacgatttaagtgccctattgagcattttatatttaggctcatgtgtcactttaggcggctatggcatgtacaactacgccattagtaaagtgtcggtattaactgctgctgcttattcaaacctcattccaatttttgcgttaattttgtcagctattttacttggcgaagtactcacactttggcaatgggtgagtatcgcagtggtattcgccggtgttattgttagtcaacgtcatcaagagctgaaagttggcgtagacgacgataatttatcagccgacaccaatagcctaaactcagtcccggaagctaacgagtcaaaagggtaacaggttaataaatacaggcctgattgtgctaaaaagccctgttcgctttgatgaataacatcaatgctgcgaacttgatagtgttcaatctggccattttgcaactgcatagagaactgctcacccactgcaacatgttttaaaaatgcaaagtgggtgtcgttatgacccgcaattaacaccccttttgtgctgccaagttcaccacttggtaaaaaatgcccgggggcaaacgcgaggtttcgccccgatgcaccagcaagtacagtcaattcttgctgctgacttggccaatttatgtgtgcagtgacataaccatcggcgtaaaaccaaggccttacttgctgattaggactttgcaaagcttgctgccaagcagactcaatcagagcctgtgccagccacgctttcgcctgcatatatccgccattaacaaacaatgcgatgccaagtaaggcgctgcaaactggcagcgctttttttagcgccgccattgccataaccatgagaatgtaagcagcagcaacccaagtagcataaacactcggctttgtccgtcggtttgcggtagcgtcatgccgttaggaagtttgtttcgcacttgcattgaacgctctgcaacctcattacccgcgtagttatcaactgcaataaaggctgtaaaagggctaagtaaatgatgctgaagtgccagagcttcgacttctgcgcgtaccgcctgtttttcgttataaagcagcaacgacttaattttttgtctggcccagagtctagcgataccttcgccgtttgcagcattggcggttgctaaattaatggtgagtggccctgtgtttgtttgcccttttaacgttaagtgctgactgccatcaagctttacggcaaccaaaaccggctctgaaaaatacaagtcaggtaatggcgatggccaatattcaagggctgctttgtcgccttcaagagcaagctctgtaaccgcaggatgcgccagcttatcaaagagctgctgcattttgggctgtacttggttggtactactaataaaagtgaatgtaccacggccaatatctgcagctctggtcataaaaaagctattaggcgcgctaccaataccgacggtaaagagcctgctgtcacctaaatctgtttgaatttgtttaaatagctgcgtttcgttacccacactgccatcggttaaaaacaccacttggcgtacaaagccatcatgctgtttaccatctagtacctgagtcagtgcttttgcgatttcggtgccgccatcggcttgtaagccataaataaagcgctctgcacggcgaatgttaaagtcattggcaatcattggcgtatcacttaataccgacacttcgttatcaaagcctatgatgttaaaactgtcattttcatctaataacgataaagcataaaacaaggcttgtttggcctgctccattgattggccatgcattgagccggaggtatcaacaacaaataccatttcgcgaggtagacgagcttgcgaggtaaagtgatcgcttggcggtactaacattagtaaaccatattcttgccctgctactgtttcggtaaaaaatgcagcctgtgagtgggctttatcaaggggtttaaatgtaagctcaaagtctctatccattggaacatcacgattaagtgataattgatagcgaccaaaacttggattatcaatttgcagacccactaaattagcgctgatatcactgagttcaaggccaatatccatcgaaatagcaaggtttaggctcgcatcagactcttggctttgtgtacgatgaaaaacaggctttagccacgctgatgccacttgagctgtgttagctgttgcgtcgttctgttgttcagtgccttttgtttctagattcgctttttgctgtagttctgccgttaaaggttcgtagcgcggcgtaatagtggttggaaaacgcagtgaaaacacaccatctcgaaaaccgattatctcttggtattgcaaggtaatttcaatctcttcccctgctccaaggtttgccacatcagtagagaaaatattcgcacgttgctgacgaactaaagcggcgcgtttaccctgtttttgagcttgctcaaattgctgttcagcctgctgtttaagggcaatgttaccggtgataatgcgctcacctatttgcatttgcatggcatgaacagcactttcatcaggtaacggaaacacataacgggcatttactgcaaacgggtgcgggttttgataacgttgtttaacaacaacatgattaataagcccagtgagcgtcatagtgacatcgtttttcactaataaacccgaagacacttggctatttgaatcatcataaaatcgcagttcggcactggcattggctgcaaatgcagggttaactgcataacctaataagaggataaaaaggctcccaaaaaggagccttttggtacggttactcaacataatatgtcactccatcgacagatgaattagtggttactttgcgctgtgcgtaagctgctttgtgacacagggcgtgtcgttaaggttacgcggcgatcaaacacgttgtcttcgtagttatttgaatcggcaacactttgctgctcaccaaaggcagttgcggttaagcgggtatgaggtacgccttgtttaattaagtagctttgcactgcatttacacgttgttttgaaagcattaaattagccaactcatcaccacgctgatctgcaaagccatttaagtcgatagccagatttggctgggcaatcagtaactgcgcgaccttgtcgagttgattagcaaagtgtggggctatttcgctagagccggttttaaactgtaccgtcatcgccaataaggtgttcaattgggcttgtagtaactgctctttttcgtcagctaatagttcaagctgctcacttagggctgcgttatcagcaatcacttgttggtaatcagcggtttgctctttcattacaactaatgcgtgggcttgttcatcaatagtgttgtctgccgcttctttttcgccaattaagccaccagcaaacgcgccaataaatgcacccactgggccgccgactatgccgccaacaagggcacctgcacctaagccaatagctgtttcttttggtgtttcttgtttagtttgactcgcagcgtctgcaaaaggggctacagatacagcagatgtgataacagcggcaataattaattttttcatggtttaatcctttttctacttaattgcttggcaacattggttggtgttgcgaacttggtatggagctattaaaacaagtcgaaatggcaataaaggggatcaaaaaaggcaaactgctgagcaattgtggcagaaaaatggcaatcgcgtttttgccagtacgcaaggcaaaaaattaggtatagttcgctatagaaagaatttaagtaagtattaacaatgaagaaaatagcaatcgttgaagatgaaacagcaatccgcgaaaactacacagaaatgctcagtgctcagggctatcaggttgtaggctttgctgacagagccagtgctgaactggcatttagtcaatctttaccagatttagccattgttgatattggccttggccatgaagtggatggtggttttttactttgccaaacattacgcagtctttctaaaaccttaccgattatatttttaaccgcccgcgatagcgaaattgataccgtatgcggtctgcgcatgggagccgacgattacttaaccaaagacatcagtatggcgcatcttgctgctcgcattggtgccttgtttagacgccttgatgccttcgatcaacccgccgatcaaaccgctcttttgcatcgcggcccattaaagttagatacccagcgcatgcaggtgttttggcaagagcaactggttgatttaaccgtgacagagttttggatggtgcattcacttgcgcagcgtccaggccatgttaaaagccgcaacgaattaatgagtgatgcgaaaatttatgttgatgacagcaccattacctcgcatgtaaaacgcattcgtaaaaagtttattgctttagatgatgcatttgactgcattgataccgtttacggtatgggttatcgctgggagcaagcttaatgctgcgtttggggcttagaacaaagtttattttcttatcctgctttttatttttattgccttggcttggctatgagtatgtttgggaaatggaaaagttcttaagacaagggcaagaaaaaaccttagtgggcaccactcgtgcactcgctaccgcattacatgaacgccctgctttgtttgactcgcaaaccaactttttagatcaagttgtaaaaggtcgagatttatacgcctataacctaaataacccgattcaacttgatggtaaattgtcggagtggcagccttatcaaagcttattttggcattacgacaagcgctacttacaggggttaagtaatgatcatcaaccaagtgatctaagttttgatcacatggtaggcaaatacgaaaactacctttatgcggcatttaaagtcactgatagctcactggtgtatcgtgctaaaaatgtgctcagctttacccgtaatgatcacttacagatcatgttaaaaacacctgaaggtgagtttaaaagttatgtggtggccgcccgtcaagatggctgggtcaatgcttttgatgccaaaacacaagagccggtcacgaaaatccaaggctactttaaaagcaccgacacgggttacaacatagagctgcgttttccgctttctatgttaggtaataagctcggttttgctattgaagactgggatgaagacaaggttgagcctcagcttatgtcgacttcaaacctgcaaaatcccaatgatatcggctctgttttggtgccttcgccagaaattaaccgtattttgaaaggcatgggccacagtggtagtcgaatttgggtcgtcgataaccatcatcgtgtacttgcgcaatcaggctcaattcatcatgccgatggcgtgtgggcagacggcctaaaagaggagcccgcaacaacctggtggcaacgctttgagcaagattacttacacccactttactataaaattttaactcgcccagaaaatgagtttattgataccttacatgatgtcgcagcgatgcaaggtactcacatagccagtgctttaaatgggaaacctgcatcatcatggcgcttaactccagataacaaagccgttattttatcggcggcctaccctatttggatccaagataaagtcattggtgcagtaatcgcagaagaaaccaccaacggtgtgcgcaccctacgtaataaatcgttagagaagctctttaatgtcattttagcggtgatgcttgttggcactgtgacactgttcttttttgcttctagaatttctagccgtattcgccgcttacgtgacaatgccgagcaagctattgatgctcaagggcggatcaccggcaaaattacttatgccgattcgaatgacgaaattggcgacctttctcgcagttttgctaacattgttagtcgcttaagtggttatactgattacttagaaaatatgtcatcgcgactctcccatgaacttcgtacaccagttgctgttgtgcggtcatcgcttgaaaacctacaaatgcagccgcaatctgaactgagtcaaaaatacctcgaccgtgccagtgaaggggttgagcggttaggtaaaattattaccaccatgagtgaagcaacgcgccttgaacaaagtattcaaaatgccgaggcagaagagtttgacctgaccaaggtgatcaccggctgcatgcagggctatcaaataacctatggtgaaagtctatttaccttgtcgcttgataaagagccgttaaatgtcagcggcgcaccagaatttattgcgcaattactcgataagctcatcaacaatgcacttgagtttaaaaccccgcaaagcacaatttccgtgagtttaaccaagcaagatcaacacgcagtactaacaattagcaaccaaggtcctctattacctgatggattagttgaacatattttcgactcaatggtctcagtgagaagtcagcaacatcagcagcagccccacttgggtttaggtctttatattgtaaggcttatttgcgattaccatcacggtaaagtattagcagaaaatttagatgatggcacaggtgttgtgtttactgtggaactgcctattaaataagcacatttgcgttacatatgattacagtttagtggcgcgatattcaccgataattcagattacaggacgtaacatttgtaatacaaaaggcaaattatttttggagggcatcatgcgatctggattacaacgtgaagagattgagttcattatggggctatttagctataatgaaacaaccgataaaccagcggctccaaaaaagcagcctgtaaaagctgacaccaaaaaagttgatacagcgcaatataaagcaaactacaaagcaacttatttgacctagctaagggtagctcattacaatggcgcacctttggaatataacgccttgtaatgaaaaaacactcacctaaaaaagaactgattttactgcccgttttgttcgtggctattttactttgtgttgcaggtcacttcctactccagcctaactaccaagacagccataccgttgagtatttactcgctgcactgccatttgccttatttgggttggtgattatcgcctttaaagttgccagtaaaaacgataaccaagaatagcttaaagcacgtgatagccaaaccaatcgggcttcattgcttgtgcttgcccgcttggcgttaatttgattgataagttgctatctaacaaatcaatcgcaaaacaatcgtctacatcgtgtaaatcatctttatgaagatgagtcattccagccaataaagactctttagcgcgttgctttgcttcttcactgctacgcgcaacgtacaatgcaaaatcatgttgttcagcaaggctatctgctcggtaagcacctaaatttacaaagtatagtttttcagcttggtgatgctgggtatcaaccacttcgacctgatagccatcaatatgctgaatttgcatatagctatccatgtgcacattgcttttatcacccacccattgtgctttaagttttgaataggtttgttcaatgttatcgcctacgacaaatcgaacgtcgtgcatttcaatgtggcaaccttgaatacgaccgcccagatagactaaaaaaagcgccatgtttttccttatattaagctttcaacattaatgttgtgctttttaattaatttataaaaatctgagcgattacgtttcgcaagttttgcggcttcggcaacattacctgctgacatctttagcgtattaattaaataatctcgctcaaattctttttttgcatcatttaacgaaagcggttcagcaatactaatattactgtttaatgcactctctaccaactgagctgcaatcactttacccggtgtaagagctactacctgctcaatcacattctgtaattgacgaatattacccggccagtcatagcgaaccagtgcatgcatcgcatcgttggcaaactgcttttgctcttgccccatacgtttagcaataagacctgcaaaatgctgtgctagcaaactaatatcttctcggcgttcacaaagcggaggcagttttaagttcaccacgtttaatcggtaatataaatcttcacggaactgctgattattgattgcctcagggaggttcttatgggtcgccgacaccactcgcacatcaattgggatctcttcttgaaagcccacaggacgaatggttttctcttgtaaaaccctcagcagttttacttgtaaatttagcggcatatcaccaatttcgtctagaaaaagggtaccaccttgtgcttgttgaaacaaaccttgatggtcttttactgcacctgtaaacgcgccttttttatgcccaaataattccgactctaaaagctcccccggcacagcgccgcagttaattgccacaaatggcccgtcactaacatggctgtgttgatgtattgcttgtgcaagcaactctttacctgtgccgctggcaccagagatcaacacattcacttgcgttggaccaagcaatctaacttgttcaagtaaatgcaacatcgccccgctacgggtgacaatattagtttgtgtcggtgtttcatcaccgtgtacaccatgaatttcgatagctttagcaaggctgtcgaacagctcatctttatctacaggcttggtaataaacgcaaatataccttgtttagttgcctcaactgcatcaggtatcgaaccatgtgctgtcatcataatcaccggcattgaaggataacgactttgtagctgacggtgcaaagccatgccgtccatttcatccattcttaagtcggtgatcaccgcatcataggtttgattttttaacgcttgtaacgcctcaataccactttcgactgtgcttacctgatagcctttagattcaatccgaatagccagtaattttaataagctggcatcatcatcaactaataaaacccgtggttttgtttcttcactcatgattactgctccttggtttcttcacgtagcagaagttgttgttcgatagtcgcaagcgacgacaaggttttttccatttcatcacttagcgcttgctttgcttgttttgctgctaagctttgctgtaaatgttgcttttgcaaccaaagatactgctttatatcgtcaggccagtaataggcgtgatcgcttttttcaagttgagcaagtgctttttcaggttctgtagcacttaacaaacacattgatttaaaaaggcttttcaattcattctcaccgacaaaatttagctttgacgtactagctttataaccaccacactgtgctgcatgccaagcaatcacagtacttgctagcgggtagtttggctcgcttttcgggcgcggtttaggattaggttttccttgcgatgcgacctgattattttctgtcttcacctctgctacgggcttcttttgcgttaatgtacagcccgtgataagcatcgagcatgcaatgaggataaaactggctttatgtgctaagcccatgtcagttaactccttgggttaattgaattggtaattcggcggtaaaaacacacccttgaggttcgttatctgtaatagagagtttgccatttaattgctctacggtttctttaacaattgtgagacctaagccactgcccatctcgctctgctgttttgcatttttgccttgataaaacgcaccaaataccgcggccttttcggaatcatcaattccatgtccttgatcaataacactgataataagtttgccatgtttgaaattcgctttaatcgtgacacagccttgttcaggcgaaaacttgattgcattagaagtgagttggatcaagatcatttctagtaactcaattgaaatataaagtgcttttttaggcagctcatcaacccataacagtgattgttcacgtgcaactagacgatgttcaaagtgacgctcaatcttatcttttatggcggcaaaactaagctcagtcactgtctctttactagtacgaatcgcattataactaagtaaactttctatcattgctctaagtcgcaccatgctttgggtgattagctcaaggactgctttttgttcatcattaatagggccaacaatttcatctgttaatagatcagttccttcaaccattgaagcaagtggggtctttaactcatgagttacatgacgtaaaaatgtatctttttgctgctcaagcatatgtagctgcgcttgaacccattcaagtttgttgccaagttcaactaactcagacgagcctcggacatttattttttgctgccaatggccttgacctagcttatcaatcacgctcgttagctctcgtagacgaccactgatccgccataaaaaccctccgcctacgagtagagtcaaaggaataagtgctactaaccagttaataaaagatgtttgcaatgcttttaattgctgctggtttttagttatacgtaattcgttttgctctctaagccaattggtttgctcactaattaacttacttgcgggggcaaataactcaccatcttgcttttgttcaaataaaagatgctgctgtgcaaattgcagtacctcagctaattgacgccactgcaaaatataatcagccgtaggacttaaaaagatcagttcatcaatacgctgaattgatgaactccacttattttcaattaatgtatctaaagattcactcttgagtacccaattttgccgcgttgctctttcaaggctatttaagtcttgctttaaattgttaaataccttagtgatttcatcattatcacccacaatttcttgcgtaacagccagctgtttattcagtgcgtttaaaaacaaaatcaccactaaacacaatggtaataaggaaagtaaaatactacatacaaactgaccaattaggcttggtcgccagcttaaacactgtttgcacttaattactatgctactttgcatacttaccctcataagaaacgctggcattcattattcgtgaatgaacttagacactcgctgaatccgaactgaaaaaagacaacttactgcctaaatcaggcgcaacgttgctattttgcaacaacacaaccaattgaaaattaagataaaaaaataaaaaccaataattacgttgcaaaaaagacacattactctgtaactatttcgtacccaataacagcaaaataacataaatcattgataaaaaagaagaataaaagttggcactgttattgtattagcacttacaaataagtttattaggacagcaaatgaaaacgaggacctacacactagccgtgctgttgagtgtaatttcaatgagcagtaatgcatttgatttaaaagatacattcaatgaattagataaagatagcaatggttttttgagtgatgctgaagcatctgaagacgctttattacatggaaacttcactcaaattgatagcaatcaagatggtcaaatttcatttgcagagtttaaatcatttattaattaggagtgtgtgatgaaacaactttttgcagcattctcgttgatgtttttagttatcagtgccaccgttttagcatcgcaaatggatgtgcgttttgcgaaatttgataccaatgccgatggcgaaatttcattaacagaagcaaccaaacacgataacttacttaagcaatttgccgatctggatgaaaacggcgatcaagttctgtctgaacaagagtttgagaaattcaaaccttaacggcttaaagtgcttgccataatcccagagggaatgtgtaaacggatttaaattttgggacttaaattatggcaagcacttttaccaaagcgtgttgacctttgtggattaaaatttgttcactctggggacgattcaatcgtggcgcgagatttgtaacctagtgggctaagtaaaaatcgagcaacaaagagttaatcgcccctaggaagaacccgaagggcagcgcgccctaataaaggagagtaattatgagaattttctggcttgcttcatgtaccttaattactataagcttcaacagcttagcattggatgtaaaacagcgctttgatcacctagataaagataaaaacggctttttatctttggaagaactttcatctcaaccgcatttaaaaaagcatatggcgcagtgggatgaaaataaagatcaacaaatatcgcttcttgaatttaaacactacttaacaaataagagttaaagcaatgtcaaaattaacctttgccagcctcgcaatgtgttgcgtatttagtacaatcagtgtcgctgcagatagtattggtgaaaaatttaaacaactagaccgtaatgaagatggcttcttgagccgctcagaatctgctcgagatccagctttatggtctcggtttagtaattacgataataataaagataacaagctatctctctcagaatacaaggcttatgccagtaaatagccgttatttttagtcgaaattttcttctgtgagttgcagtttactgcaactctgatactgttttcatacattaaaaaaataattaaaagattatgaaacttatcatcagcctactggcaacagcttcactgagttgttttgccaacaccacagttatctacaatgtaaatggttatacaccaacctaccaaggtgaaacccaacacttttcagcactggtttttaaagacggtaaagtcgtaaaaactggcgatgactcaattaaaaaaagcttccctgacgctaccactattgatggcaaacaagccactcttttacctggtttagtcgatgctcatggtcatgtgattggtttaggtaataatctgtctcaacttgatgtcagaaatacccgttcagcagatgaggttggcaaaatgctggctgaatttgctaaagataaacaaggctggatcattggccgcggctggaaccaagaacaatggcccggcggacagtttccaaccgctgctgatttagacaaatatgtaaaagataaacccgtggtactttctcgggttgacggccatgcggtctgggttaactcaaaagcaatagaattagctgggatatctgcagccaccgattcacctgctgggggagaaatcatcaaactgacttcaggtgagccatcaggcgtatttattgataaagccgaaacgcttattacaaagcatgtaccaaaagtaagccatgccagcattaatacagcattagacaatgctggtgagcatttactaagtttggggatcacctcaacccatgatgctggtatcgattatgatacatggcaagtatataagcagcgttctgagcaaaataccctgccagttagaatcgtcgccatgcttagtgccgccgatcctaagctagaagccatgcttaaagctggtcgttataaagatatgaacgacatgctgtctattcgcagtgtcaaagtatacgctgacggtgccttgggtagtcggggtgccgctctaatcgaagagtatgcagatcgtaaaaatcatcatggcttaatgcttgaaacccaagagaaacttgaacaattatttaacctgagttttgctcatggctttagtgcgaacacccacgccattggtgataaagccaaccatgtagtgttagatgcttacgaaaatgtgtttaaaaaatcaggaggcattttactgcgtaaccgcattgaacatgcacaaattgttgcccctgatgacattcctcgctttaagacactaaaaattattccatcaatgcaacccgttcatgcaacctctgatatgcatatggctgagcagcgtttaactgagaaacaacttgaaggggcttacgcttggaaaacctttttagcgcaaggttcagtaattgcagcgggttctgattttcctgtagagcttgccgacccatttgatggtttatattcagccattacacgaatggatcacaatcaacagcctgaaggcggctggcgtcctcaagaattattatctcgcgatgaagcgctgcgtgcttttactttaggtggtgcttatgccgcacatcaagagtttaaagttggtagcttagagcaaggcaaatgggctgactttattatgattgataaagactattacaaggtgcctgtatcagaaattcacgatattagcgttactcaaacttggattgcaggcgagcttaaatataaaaaagaggattaagggtttttagcgtcagttttttgctgacgctttaactttatgatgtggtaaatatttacaaatgccagtaagccattggtgaaggccaccggaacggcaccaattgcaagaccataaaaggtaaaagcaatacagcctgctaggttgaaccagcggagctttaccacatcactcatcgtcaaagaagcaactaacagtgcagatgctaaatagcctaaatattcccaactcaattgttctctcctaggctttaggttagcattggggcttgtcattttttttgacgcactcagtgctactttgacaataaataaaaaagctaacctactaaaaaccttgtaaagcttaagaaatcatcttagctttaaaatcattacacgggaaatgaaggtatcagtaacgtgtatcaccttactagtaagttagcataaattctttgaatcttaatgctagcgtcattaagatgtaataaataggacaattgtccgaagagcggcgttaatgtttcaatatcatttttcaagctaccttgttgaccagctactgacatttgcaggcagtagttttcagcaagctaaaaaagaagtgcttattcaccaagatcaaccactcagtaaacttgttttagtgagaagtggcactgtatcgtttagctatgatgtgggtaatggccgtcgccttttattaggtcaacttgattgcaacaacaccctgattggtgaaattgaagcgctcaataacttaccctgtatttacacagtaacttgctttagtgatgtcagttataacttaatagaactaaagcactggcgttcactactgttagaaaagcctgaactgagcttatatacagcgcaaactattgctgcaaaattccaagaaaatcaaaaaataaatttagataaattacttttaccacttagctataacatagctaaagattgtttactgagagcagaaaataacaatcccactctgctgcgtgcatatccaacggttaatgcagaagctgagcgctttgccacaactgaaagagcttatagacgtgtagtaacagaacttgttgaaaaaggcttagtacaacgcagtaatcaaggcctgcaagttgttgatattgaaaaactgagtgattatgtagagagtttttcgcagttatgacagcataactgcgaagaaatacttggattacttttctaacaaaatatcgtggatattttttaaatcagacttaccttcaataatctcatccggtgttaatcctgacagctcatgcgggaatactagccattcatcagactcatgaatgtaataatcaggtaccatatctacctttgagttcttaggcttgtagtaaggacatgcaacgcgaatatcacgtggtaagttcaaacgcattagctcagaaagcttttctttcaatgcaaaaatactgcggccagaatcaaacacgtcatcaacgattaataatgagttgtctgcattggcattttcaatgatgtaatgcaaaccgtgaactttgatttcttttgattgttggttaataccgtaatacgaagaagtacgaaccgcgatgtgatcagtctcaatgcctttgtaatcgtaatattcttgaactgcgataccgattggtgcgccaccacgccaaataccaatgatgaaatcaggacggaaaccatctttataaacttgtgccgcaacacgaaatgaatcttcaagaagctgctgcgctgtgatatagcacttatctgacataaatagagaccccagtgtgaatgatcattcaagtgtagctaatttaataaaaactaaccacaggatgagaaaatgtggggcgggattttatactaatttactcaaaaaagcttgtatcagtttgtaaaattactctttagatcaaaaaagcgccttaactttaggtaaagttaaggcgcttaattagctacaaggaaattacttatgctttttctagtaacgttcttgcaacggtacgcataccttgtgttgtagcgcctgcagcccactcgcttgtgctacccatgttaaatgctgcagcaaggtcaatgtgcacccaacctttgccttcatttggcacaaagcgtgataagaaaccagccgcgttagaagcaccaccgaagcccccccctttttgaggacggctatttgctgtatctgcatatggtgatgggcagttttgttgatgccacttttcaagaggtagaggccaagccgcttccatttcttgctctgcaaattcctgtacgtcacgtactagctctttatcaagaccaaacagtgcgttgtactcttgaccaacagcaacaagtgcagcgcctgttagcgttgctgcatcaataattaatggcgcgccagactcacccgcagccattaagccatcagctagtactaaacggccttcagcgtcagtattaacgatttcaactgtggtgccatttttgtaagttaagatatcaccaagtttgtaggcatgacctgaaataaggttttctgcacaacataagaacaatttaatacgcttgttgataccacggctgatagcaagcgctaagcctgctgttactgttgcagcaccacccatatcgcacttcatgcctagcatgccttcacttggtttgattgaataaccacctgagtcaaacgtaatacctttgcccactaaagctgctgcaactggcgcattttcatcacccgttggattataatctagtgctaataaaactggcggacgctcactaccacgaccaactgcatggataccaatccattgctgctccaacaacgcatcgcctttgatgatttgatagcttacatgctcaggcgctaacgactgaataaactcagccgctttaccagctaggctttcagggaagatatcatcggctgtgccgttgatcatttggcgagcccatgtagccgcttgctttaatgaagctagctctttgctgtctgtttttgcgttctcaacaaattcaatcgcatctaaattctttggtgaaacgaaaccttggtaaaaggcccactgtgtttctgtgcaccaaacgtcacccactaacgcgatgttttttaaaccttgattagctaacgtgcgtgctgctttttgaacacttttaagtgtatcatgctcagttaaatgaacagttgcgccttgttcagtaaaagaaagagtggctttttcgccccaatgtgcggcagcactgtgctcgctaagttgaactaaaaatttttctgacatgttagaatactctttgcgctagaaattgtcgctcgagtttactacagcacgcgtcagttcccaactgcttgcgataaatagccaatatcgacgtggttcagtccatgtattgaattacatacaaaaattaaaagcgatccaataacgccatgaaatttacgccaccattacaatctgccactttactcaagcgctataagcgcttcttagctgatttaaaaacgccttgtggtcacgagtttaccgctcactgcgctaacactggtaaaatgactggttgtgcagaacccggctttaacgcttattactcaacgagtgacaacactaaacgtaagtatccccactctttacaattaactgaaaacacgtttaatcagcttatctgtgtcaataccgctattgccaatcaagttgtccacgaggcagtgcaaaatggggtgattaaagagcttgctgactatcaaaccctaaactcagaagtaaagtacggccaagaaaatagtcgtatcgattttttattaacagatgaacacaaaccccactgctacttagaagtaaaatcagtgacattgctttcgcaagcagaaccagaatctggacaaggttattttccggatgcaaaaacggagcgaggccaaaaacatcttcgagagttaatagagatggcgcagcaagggtatcgtgcagtgctattttttgccgttttacatgaaggtatcaaccaagtaagtgcggctgcacatatcgatcctaaatacgctcagcttttaacagatgcaatagaaaatggtgttgaagtcattgcttacaaagcaaaaatttctgctgaagaaattaaactgcaagaaaaatgtgattttctgagctaaccaactcttttactaaaatgacaataaaaaacacgatttaagttgtattatttttttttgcctatataacttagcaaatttattaaaattatgagtagtggctctactcatggcaatttatgcaatcaggggtcgaggcatataaattaagctaaaataaatttgcctcaatctaatgattctgctatttatagccgccggctaacgctgggcaaaatattaaggatttaggagaaagttatgccagaccaaaaaagactagggttattggctcaggccgggttggaaccataccaagaacagccaggtgaagagtatatgaatgaagcacaacgtgctcatttcaaaaaaattttagaagcttggcgtaatgatttacgtaacgaagttgaccgcactaaatcgcatatgcaagacgaggcagctaactttccagatccagtagaccgtgcagcacaagaagaagaattctcattagaacttcgtactcgtgaccgtgaacgtaaactgatcaaaaagattgaaaaaacgattcaactaatcaaagaagatgactttggtttttgtgaatcatgtggtatcgaaattggtatccgccgcttagaagcgcgtcctacagcagacttatgtgttgactgtaaaacgcttgcggaaattaaagaaaaacaatctggacgcggttaattacacccatttgcttaattagcccatgcctaccacagccgttaatacgcaaaagcgtgaatatcgtggccgctttgcgccatccccttcggggccattgcactttggttcacttatagcggctgtggggagcttccttgatgcaaaagccaatcaaggaaaatggttagtacgcattgaagatatcgacacaacgcgtgttgtaaatggtgctagcgacgacatattacacaccctagaggcttacggcctgcactgggatgaaagcgtaatctaccaaacccaacgtcatgaacagtaccaagctattgttgatgaactcatttctcaaaaccttgtttatgcatgccattgcacccgtaaagaaattaaagctatcgggggcatttaccaaggtcattgccgacataaaaatcattctttagctgattcagcgctgcgtttaacccagcaatttgctaccagcaactatgatgatttaattcaaggtgagatccatgtagacaaccagcttgcacaagaagattatctaattaaacgcagtgatggattattcgcctatcaactggttgtggttgttgatgatattgcacaaggtatttctcatgttgttcgcggcgcggatctacttgagcccacagctaggcagctaagcttatttaagcaacttaatcaaccggctccgcagtatgcacatttaccccttgcggttgcaaaaccgggttttaaattgtcaaaacaaaattatgcgccggccatttctaaaaaagatcctaaacctgcactgtttgatgccttgcgctttttaggattacagcctgaggcatccatcctctcgttaagcattgagcaaatgcttgagtgggcaattaaaacctatcgtatggaactggttcctaagagcctagaaatccaagttagtgaggatcctaactcagctttttgtgactttcttactattacaaaataaattgccaattttaaaggtagagtaacttaatttttcagccacgctggtatatgatagcgacccaaagtgtacgattcatcaacaccttgctttagcgtcatattaaacactccgttatcgagtcaatctctcatcggcgaagtaacaaacaagcgctatacttgatgagtcgcagagtccgcgtcgtaggagacagattattatttccaagctttttcaattttgtcggcagattattggcccaaatgccacgacatccagtaatgctgtacaaacgagcgagttacctttggtgatcgagcgcagtgaacatggtatttcacgcaaacaatttagcccaaatgcaatcaaagtattataccgccttaaagaaggtgggtttgatgcctatctagtaggtggttgtattcgagatatattgttaggccagcaaccaaaagattttgatgttgtaactaatgcaacgcctgagcaaattaaaaaactctttcgtaattgtcgactaatcggccgtcgctttcgcctagcgcatattgtgtttggtcgcgaaatcatcgaagttgctaccatgcgtggtcaccatgaagcggatgaaagtaaaaatcaaataagccaatcaagcgaacacgggcaactcctgcgcgataatgtctacggcagtattgaagaagatgctgaacgccgtgacttttcaataaatgcactgtactactcgattaacgacttttgcatttatgattacgctaacggtatcagcgcaataaaagcgaagcaaatcgagctgattggcgacccagaaacccgttaccgtgaagaccctgtgcgtatgttacgcgcggttaggtttgcaacaaagttgggcatgagcatagcgcctgccacagaaaaacccattaaaggccttgctaatttactagatcatattccgccagcgcgtttatttgaagagtcacttaaactgttcttaaacggcaaagcagaagaaaactatttaatgctccgccaatatgggttattcaaagcgctctttcctgcgcttgataaaatcttagatgctaacccagatggcattgagcatgcgtttattctgcaaatgtttaaaaacacagataagcgtattaatgccgataaaaaagtcactccggcctttatttttgccgctatattgtggtttccactacttaatattgcgaagaaactacaacagcgcgaccaactgtcagaatacgatgcatttgcgcaagcaatgaataaagtactcagtgagaacgcgcaacatgttgcagtaccaaaacgctttacattaggtgctcgtgatatttggcatattcagcaacgtcttgataaacgaggtggtcagcgcgcctacaggctaacgcaacaaccacgttttaaagcagcttatgacttcttactacttcgagttcaagctggtgaagagcagcacgaagagctggcaacttggtggacaacctacctaagccaagacatcaacgggcaaaaagaaatggttaaaaacctcggccatcaaggtgggccgaagcgtcgccgccgccctcgcaagaaaaaagctgattaagtatgaacacggtttatttaggattaggcgctaatttaaatgcgccacgtaaacaaattcatgcagccgttgaagcgttaaaagccttaaaggaagttgagtttgtctgtgtctcgcacgattacgcaagtaaacctatgggaccacaggatcaacctgactatgtaaatgccgtagcctgtgttaaaacagcattacaacctgaacagctacttgatttaactcaagctattgaacttgaacatggtcgagtacgtaaagaagaacgctggggtccacgtacccttgatatagatattttattgttcgccaatgatgtgatcgacacccctcgcctaaccgtgcctcattacggcctaacagagcgagaatttgtggtgtatccgctacttgaaatcgcgccatcactcattttaccgaacaatcaatcacttgctgatataacaaaaacgttgcctttaaacggtttacaacaactccctcagcagtaatcaaccaaggcaaagccttagaggaaattatgtctaaaatcaccgtttcaactctcaataaaatgaaacaagaacaacaaaaaatcaccgcattaacagcctacgatgccagttttgctaaattgtttcatgataatggcgtcgaggtgattttagtcggtgactctttaggaatggtattgcaaggtggtgatgacacattagcagtaaccaacagtgagattgcttatcatacacgctgcgtacgtgccggtagccgtgaattgtttgtgattgctgacttaccatttatgacctatgccaacccaactgatgcgtgtaaaaatgctgcagagctaatgcgtgcaggcgctaatatgatcaagcttgaaggcggtgagtggctgcacgacagcatcaaggctatgacgcaacaaggtattccagtttgcggtcatttggggttaacgccgcaatctgtccatgtttttggtggctttaaaattcaaggccgcgagcagtctcaagctgataaaatggtcagtgatgcaaaagcccttgaagcagccggcgcgcaacttatcgtattagaatgcataccaagtgagcttgctaagcgtattactgatgaactaagcattccaactattggtattggtgctggcaatcaaactgatggacaaattttagtaatgcacgacttagttggcatttcagcaggctatattcctaagttctcaaaaaactttttattagagacaggcaatatgccagcagcagtgcaaaagtattgtgaagatgtaaaaagtggtgctttcccaagtgccgaacacgagtttaaataaatgcaatcaatcactgaaatcaaatcgttacgcagccaagtaaaagcatggcgtcaagcaggcctgagcattgcgcttgtgccaaccatgggcaatttacatcaaggccacttttcacttgttgaaaaagccaaaacactggctgataaagtcgttgtaagtatttttgtaaacccgatgcagttcggtgccaatgaagaccttgatagctacccacgtacgttgaacgaagacaagcaaggtttagcagatcttggtactgacattgtgtttaccccttctgttgagactatttatccgaatggtttaggcgaacaaagttttgtcgatgtaccgggtgtgtctatgggttactgtggtggctcacgtcctggtcactttaaaggtgttgcgacggttgttactaagttattcaatttggttcaacctgactttgcttgttttggtgaaaaagattttcagcagctacaagtcattaaaaccatgacgcgcgatttatctattccagttgaaattattggcgtacctacttgtcgcgaaatatctgggcttgccatgagctctcgtaatggctatttatctgatgagcaaaaagacaccgcaaaagtgctgtttgccacgctaaataatacagcaacagcactcaaacaaggtaacgcagacatcgcaacacttgaggctgatgcaaaaactcagctcgaaatggcaggactaaaacctgactattattcgattgcagagcgctcaacactaaaaccagccaccgcggctgataaacaacttgttattttagctgccgcctatttaggtacagtgcgtttaattgacaatttacaagttgagctggattaaatagcaacaatctgggtaagatggattgcaaagaatagacataaactagggataagcatgaaaaaactaccagcaattgcagcaacattgtttgctatgacattactgtctgcctgctcaaacaaaattgacaatccagaaatgcagcaatgtgctcagcaaaactatcaatgcgaagcaagctgtgaacaacaaagcacggctgatggcttagttcataaagtctgtagcaacaagtgcattgaagcttacaaccaatgtaaagccaatgcagaaaaattaggtgaagttaaataagctgatttttcgaggcactgaaaacaccttcagtgcctgcactcccctcctcgattacaatttcgctttcacaattaagcctatggtaattttgttcatatttttgttcgtcctttaagctattcatattagggcaagctttcgttcattaaacttctccaaattggtgacgaataaacaactgcaaccgtgtaattgtttctcactaatttcaaatttttaccaactcgcatttactgtacgaactcaaagccattgagaatattagtttttattatgggttcagtaattgctaagagatatgaatgaattaacgtgatttacggctaaaggaaaattgaatgagaccagaaacccgaactaagctcttcagcgctgtcaaaaagaagaccttcttgggcgtattattagccatgagtgcaggtactagttacgctattgaagacccagaccagccaaaagcgactgaaacagaacaaacagccgtcaaggttcaagctaccgaaaatgaaaaacagcaagtaaaggataatactgctgttgagcttaagcctgcaatgatcacgattcctcaagaaaagctatttgaagtcatcaaggctcgcgcaaagaaattagcatctgaaccgtatgttgcaccaaaagatttagagcttgaagcattaacaagcatcggctatcaagattatcgtgcaatccgttttcgtactgataaagcaatttggaaagatcaaagcctgtatgaagtgcagttattccacccaggctttttataccgttcaccggttgctattaatactgttgagcaaaatgctgaagtaaagagtttaccatttaaaacagattactatcgttacgatgcaaccgctgcaccattagaacaagagatcagtaaagcaattgccaatacacaacttggtcatgcaggtttccgcttgcattttccactcaataataatgagtacaaagacgaagttgcagtattccaaggcgcttcttattttcgtttagttggcccgcatcaggtatatggtctttcagcccgcggtcttgctattgatactgccttgaattcaggtgaagagttcccggtgtttaaagagttttggttagtaaaaccagcacccgaagataccactatcgtgctttatgccctattagacagcccatcagtatcaggtgcttatcgctttgaattaacaccttctaccaatactgaagtaaaaaccgagatgcagatctttgctcgtaaagacattaaaaaacttgggattgcccctttaacaagcatgttctatcacggtgaaaacagtaccaagttttttgatgattaccgcccagaggtacatgactctgatggtctattgatgcaatcagaacaaggtcaatgggtttggcgtgcactgaataacccaaaaaaattaagcgttacttcgtttagctacgagaacccgaaaggctttggtcttgcacagcgagaccgtgattttaataactaccttgatactgaggcgcattaccataatcgtccgagtatgtggattgagccaatgggtaactggggtaaaggacgcgttgagttagttgagatcccaacagatacagaaaccaacgacaatattgttagctattgggtgccagagcagccaatgaaagccggtgacaacttaagctttagttacaagctttcaactttcaatgccacgctggcaactcaagataaagcgagcgtgttaagaacccgaattggcagtgcagcgctaccaggtgagaaaaacccaccaccgaaaagccatcgtcaatttaccgttgattttagtggtgaaaacatcaatcaactttcagctaattttgccatgatggccgatttaaccctgtcatcaggtcaagtgagcgataaaactgtgcagcagttaccaaataatcaaggatggcgcgtagcctttaaagtggcgccagagggagataagcctgtagatatgcgcttatcgttaaaactacgtgacaaagaaatcagcgaggtatggagctatgtctggtatccaaacgacgtccaatagtaaagcattagaagcaacagcaatgccgttcaaaaaaacacgcgcttggcttttttcgagcctagcgctcaccattaccgcctatggcgtgtggatcatgttcgatattttaaattctaacggcatgacaccgcttgagtacgctttactggcattatttacagtcaccttcgcgtggattgttacagccttttgtagtggctgtatgggcttcatcctgcaattatttcgtattgacccgttgaccttaaaacgtcaaaagccaatcgaaattaatcagcacgctttaagccaaactaaaacggccattgttatgcctatctacaatgaagatacagaacgtgtgatagctggttttgaagttagtcttcgctcgctggcaaaaacagggcagatgccacattacgacttttacttgcttagtgatacgcaagaccctgaaattgcacgtaatgaacttaaagcatggaattcactcactaaacgcttaggtgatttagcaaagcataccttctatcgtcgccgtgaagacaataaacaccgtaaagtaggtaacttaaccgacttttgtgaacgttggggtagccaatatgatcacatgattgtacttgatgccgatagcattatgacgggtcagtgtatgcttgagcttactgctagcatgatcagtaatccaaaatcaggcttaatccaaactattccaattccagtacgccaagacactttttttggtcgctttttacagtttgcctcaattttatatagcccgatgctagcaaccggttctgctttttggcaaacaaaccaagcaaactactggggtcacaacgccattattcgcgttgaggcattcactaaatgctgcggtctgccagttttaaaaggcaatgccccatttggtggtgaaattttaagtcatgactttgttgaagcttcacttcttcatcgtagtggctgggatgtgttactgctgagcgatgttgaaggtagttacgaagaagtaccaagtaatattcttgattatgcgattcgtgatagacgttgggtgcaaggtaatatccagcatttaggtttattgcctaaatctggccttaagctaatgagtaaaatgcactttttatttggtgccacagcctatatctcatcgttaatttggttatctatgctggcattaagtaccttagatgcggtgactcgtgcgctgaatagtgacgtgtattttaaccatgcttatcagcttttccctacttggcaaattgccaaaacagatttaattgattcgttattatttattactgccgtgctgttgttactgcctaaattaatgggtgttattgtaactttagtacaccgtaacaaagcctttggcggcaccatgaagcttattgcaggttcagtcatcgaaaccatttttgcgattgtgattgcaccgctaatgatggtatttcatagctattttgtagtatgcgtatttttgggtaaaaaagtcagttgggatgcacagcctcgtgaaggccgcatggtgccttggaaagaagcgattggttatacgttattttcgactattaccgcaattatttggggaggcgtcgcttactacttcacaccaaccttcttttggtggttatcacctattttagtgggtcttattttggctgcaccgattgtacgctactcaagtagcatcggcttaggtgttaaaatgcgtaaaatgggtttatttttatgcccaagtgaagttgaaaacgatgatactttagcggcacttcgtgtacaccaacaagaaattggtttaccaaaagatgaacatgctgactttagtgttcctgcattaccgaatgaataccctacggtaatgccaattcaaagctttaaggcaccttcgggtaaaaagcgcaagcaagtacgtattgctcagcaacgtatcaaggcaaaattatttgccaaaagctaaacgaaaaaaaccgctcaatgagcggtttttttagctatgtctgtatggttgttacagaaggcctagctttttaagttcagccattgccattttgcctgaaagtggcacataaccatctttctcaacaattttttgaccatctacagaaagaaccatttttaagaactctgcatcaattggtgcaagaggcttgttagggtgcttgttcacgtaaacatataagaaacgagatagtgggtatttacctgttgctacgttttctaatgttgcatcaacaaagttatcgcctttcttagcaagtggtactgtacgtacacctgatgttttataaccgatacctgagtaaccaatcgcgttcactgacgaagagattgactgtactacagatgcagaacctggctgttcgtttacgttgttacggaagtcacctttacaaagtgcttttttcttaaagtaaccgtaagtacccgatactgagttacgaccgtaaagctgaatatcttttgcagcccaatcgccttctagaccaacatcgctccagcgattaacttctgcttcagcaccacatttacgtgtagaagagaaaatcgcgtcaacttggtcaatacgtaaacctttgattggattgtctttgtgtacgaatacagcaagtgcatcgattgcaacgcgtacttcagttggcttatagccgtaacgtttttcaaatgcttctatttcttttgacttcatacgacggctcatagggccgaagtttgctgtaccttcagttaatgcaggtggagccgttgaagaacccgctgcttgaatttggatgttcacgtttggatagaagcgtttgtactcttctgcccagaacgtcatcatgtttgcaagcgtgtcagaacctacagatgagaagttaccagagataccacttgtttttgtgtactcaggcatatctttatctactgcagctgcttgtgctgatacaaatgttgttacagccacacccattgcggcaacgagatttttgaatttcataggggttactccgatttgttcgtcccatttcctaactgcggtctactctaatgacactagatgacagttagattactctaaaatgacatttttatgactttgcagttttttcaattttttctactatcgatacgattttttcattaccaaatgcgaacgaaaaagttgaaccctttcctaattgactgcgaatatctaaacggctgtcatgacgtgtaagtacatgttttgtaatagctaaacctaagccagaaccaccagtagtgcggctacgagccttgtctacacgataaaaacgttccgttaagcggtttatgtgctcagccgcaatgccatcgccattatcggtcacactaaataaagcttggtcatttttacgctgccaatcaaccacgattttgccgccaggcttggtgtaatgaatggcattaaaaacaaggttagaaaaggcactacgcaattcatcttcagcaccttttatatcgaggctggcatcaatgttaaaaatcagttcatgacctttatcttgatttagtgactgtgcctcagtttgaatataggtaagcagctgcggtacattgacaggcttgtcgttatcttgacgacgcgccccttcaatccgcgacagcgacagcaattgattaaccaagctgtccattcgcttacattgctcgagcatagtcgtttgcgctttgtgccacattgcaggaggtggcaggctttctgaatcaagcatttctaagtaaccggttaccaccgtaagcggtgttcttagctcatgagacacattagccacaaaatcttttcgcatttgttctagttgctttaagcgcgtgacatcacgcactaccatcatcaactgcgaacttgcataaggcataacacgaaactctagagtttgatcgtagctgtggccaccatcaagctcgagcggttcatcgaaacaggctttgtgcatatacttagcaaatttgggatcgcgaataagattatctaagcgttgcccatgatcggtcggccattgtagccctaacactttaagtgctagctggttacaccatataatactgagatctttttgtagtaccacaacggcatcaggtaccgcttcagcaccatctcgaaaacggcgtattaaatctgccagttcattgcgttttttacggttacgatgttgtaaatgataaatcccttcaaagacttgctcccacgctccctccccttcaggtgggttaaaactacgttgattaaggagccaatcgctgaggcgatataattgatgataatgccaaattagaagtgcaaaagagcctaaaaataaaagcaaaaaaggcgcacctacaagtacgccaactaataacaagggtaagaaatacataaacaggcgttttgctaacgcctgtttattcactactcgatacatacactcactttaccttaagtatgtaaattagcttgttaaggtcattcctatgacacttataatttacttgaaaaacgatagcctgcaccacgaacggtttgcactaaacggtcatgccccaatggtgcaatcgctttacgtagacgacgaatatgcacatcaacagtacggtcttctacgtatacatttgttccccatacatgatcaagtaattgttcacggctgtaaacacgttcaggatgagtcatgaaaaaatgcagtagtctaaattctgttggtcccatatctaattcactaccttctgatgttacacggtgtgaaattgggtcaaggcgtaaaccatgaacttcaatagcttcttctaatgaagtaggtgaaacacggcgaataaccgctttaatacgcgccattaattcttttggtgagaaaggttttgttacgtagtcatcagcacctacttctaatccgcgcactttatcttcttcttcaccgcgcgctgtcagcattatgatagggatttgacgagtatattcattttgcttgaactttttagcgatttggattccgctaccaccaggtaacatccaatctaataaaaccatatctgggtatggctcaaccatcgcttcaatagcagagtcataatcttctgcttcaattgcttgaaaaccattttgttctaaaacaaaaaccagcatctctctgataggcgcttcgtcatcgacgactagtactttacgtgacattccaatttatctcttacgttagcgaactggtttcattattatgactaagtatgacatttttatgaaagtctaacgagtaattcaaaaacttcaaaaaaatcagcgtaaaaataagcaattttaaggaaaaaacagccttttcaggctaaaaatcataccttaaagtgactgctaaatgatcttcatcagaattattatctagtgaaaattgcgtataccacatatacatacgtgcttgttttgacaggcttcgctccacaccgactgaggtaccactgcctgaatctttgagcttgccaaagtcaccatcagagtcttgatattgtgcgagtaatttatatttatcaattttataagaggcactgactaaaaagccatcttctttgtttgaacccgatactttttcactttgttgatacataccgcctaaggttagctcacctaatttaccttgcgcagtaaaccgtgttgtatcgtaacctgctactttactgtcgtgggcaacacttacaaaataaggcgcttttttaagcttgctatcaccatatgttatcgctgcagaaatacctgtttcatcattttgtttggagttatcttcagcaatataggtcactacaaactgcatattaccaactattggtgagttataatgcagcacatcaccaagacggttttcaccattaaacaaagccttaatatcaccattaaagtcattcattaaatcaactttgccttgtgcgaccttcaacgcagtatcatgacggcctatcacaatttgcccataactgccttgtaaacctacatattgattacgtgcggtaatattctcttcagttttaccatcgctgtcttgatcagcggcattaaccgcaaattcaaatttatatacggcttttaaaccatcacttatatcaccactacctttgatccccattcgtgagttgtagctctctatggaagtttcactgccatttccagtgtcgctgttagcaatccctaaatgagcccgtccatatacatctactgcttcggcagcactatgaaaggaaataaagcacatagcaaagctcgacaacatcatggcaggttttttcatggtagcgatccttaatttaagcagtaacttaaaaatcgaacataaagggcttttggtcaaggcaaggagaggatatttcaaataaaaatcacggatcactgatctaccaactaaatcagatcaggatcaggtttttactaagttgatcaatcacagatcagttttttacttagagagtacgttaacttgttgatttaatgttagggcgatcagcccattgtttaaaaggtgaacaaagaaaagcccctgatcagtctacaactagtaaaataatgatccgtgaaagccaaggttagtaaaacactgatcctgaggtgcatgagtaagtaaaccgatgatccgtcttgatcaaggcaataaaaaaccggcaaaaagccggctttttcaacttattatcaattacttgatttgtggatcaagttcacccgataagtatttaaggtgcatatcatctaaagagattggcttgatcttagccgcttgacccgcagtaccaaaggcttcgtaacgagcaacacagatctcagtcattgctttcgttgcttctgctaagtatttacgtggatcgaagttagctgggtttaaagctaagtgacgacgaatagcacctgttgatgctaaacgaagatcggtatcgatatttactttacgaacaccatacttaataccttcgatgatctgctctactggcacaccataagtctcagggatttcaccaccgtattgattgatcacttctaaccactcttgtggcactgaagacgaaccatgcattactaagtgagtgttaggaatacgggcatggatctctttgatgcgatcaatcgctaagatatcgtctgttggtggacgagtgaatttgtacgcaccatgtgatgtaccacaagcgatagccagtgcatccactttcgttttacgaacgaagtcagccgcttcttctggatctgttagcatttgatccgtagacagtttaccttctgcaccaacgccatcttcttcacctgcttcacctgtttcaagtgaacctaaaacacctaactcgccttcaacagacacaccacaagcatgcgccatttcaactgtttgacgtgttacatcaacattatattcgtagcttgaaggggttttaccatcagacattaatgagccatccatcattactgatgaaaagcctaattggattgaacgctgacatacacccggtgatgtaccgtggtcttgatgcattacaactgggatatgtggccattcttcaacggcagctaaaatcatatgacgaataaaaggggcaccggcataggcacgagcgcctgcagaaccttgtacaattactgggctgtttgttttgtcagccgcttccataattgcacgcatttgctcttggttattaacgttaaacgcaggtacgccataaccattttcagctgcatgatcaagaagttgtcgcatactgattaaagccatttggtattctccaaattgtatcgacagtagttacctaccatctagtttgaacggatataagttattttttgatgcatcactgcatcgcgagaagctgtcgcctaccgtaatagctgtaaataaaatgagggtgagaggtattttataaacagctaaaccagcgtaattacttaacaactacgctggctttcgtgctaattacttagcacgttcttcaagcatagcaactgctggtagttttttcccttctaaaaattcaaggaaagcaccgccaccggttgaaatgtaagaaactttatcggcaatgccgtatttatcaatcgctgcaagcgtatcaccgccaccagcaatcgagaatgcatttgagttagcaatcgcatctgcaatagcacgtgtgccgttaccgaattgatcaaattcaaatacacctactggaccattccatacaacggtacccgcattagcaataatttttgctaattggtttgctgtatcagggccaatatcaaaaatcatgtcttcatctgttacttcagtcacatcttttagtgtcgctactgcagattcagagaattcattacctacaacaacatctgttggtacaggaatttcgccattattcgcttttgccgctgcacttaatttgtttgcttcatcgattaaatcagcttcatataaagacttgcctactgggtgccctgctgccgcgatgaaggtattagcaataccaccacccgttacaagttgatcaaccactttagatagcgaatcaagtacagttaacttagtcgatactttagacccaccaacgatagccactaaaggacgagctgggttatcaagcgctttacctagtgcgtctagctcggccgcaagaagtggacctgcacatgcaacatcagcaaataagcccacaccgtgagtcgatgcttgtgcacggtgagccgtaccaaatgcatccattacgtaaacatcacataatgcagctaattttttagacagtgtttcgtcgtttttcttttcgccaacgttaaaacgaacgttttcaaaaacaaccacttcgttgtctgctacatcaacgccatcaaggtaatctttttcaagacgaacagtttgctcaagagcattatttaaataatcaacaacaggggcgagtgaaaacgcttcatcatattccccttccgtagggcggccaaggtgtgacatcaccattactttagcgcctttttctaacgctaatttaatagttggtaatgctgcacgaatacgtgcatcagaggtcactttaccttcttttacaggcacatttaaatcttcacgaattaacacgcgtttgccgtttaaatctaaatctgccattttaatgaccgacatggacttctccttagttaacgatactaatattatatttatacattattggcttacagccatcatcgcacgcgcagtgtcgagcatacgattagcaaagccccactcattatcgcaccacactaacaactttatcagtcgtttatgactaacacgtgtctgagtgccatctatgatacaagaatgtgggtcatgattaaaatctaccgataccaatggctcttctgtgtagcttaaaataccttcaagacggtcttttgctgctaacttcagtgcttgattgacagtcgctaaattcacatcggtattcactgttacacttaaatccatcgccgtcacattgatagttggtaccctaacagcaatggcctcaaagcgactatgaaacttaggcaaaatgcgctcaataccacgcgcaagctttgtatctaccggaataatagactggcttgcggcgcgagtacgacgcaaatcatgatgatacgcatcaatcacttgttgatcatgcatcgaggcatgaatcgtcgtaatggccccagactcaattgaaaatgcgtcatctaacactttaatcactggcacaatacagtttgtggtacatgaaccatttgaaacaatcgtatgttctgcttttagctcatcatcgttaataccatacacaattgtggcatcaacatcagcatctgctggctgtgaaaacaatactttttttgcgcccgcagctaagtgtagctctgcatgttcacgtgagtgatacaccccagtacattcaagaaccacatcaatatctagtgtttgccaaggcagttctgcagggttttcttctgcaaataaggctatagagtcgttagcaaccgttaaagtatcttcgccaagattaacagggaatgaaaagcggccatgagatgtatcgtatttaaggagatgggcaatgccctttgggtcggctaattcgttaatagcgacaattttgagttgatcttcaagcccagattcatacagggcacggacgatattgcgcccgattcgaccaaaaccattaattgcaagtttgattgccatgaagaagaaaatccactctatttgcttgcagataaaggcagctgccttttagatggcggtattgtaatcgaccttacacatttttataagagggcaaggtaaataaaactactttaacaaccctagatggctcaattttggtaatcgacctgaagagtttttataagaggtctgcaaaaataaaaattgcttagtatgttttagatggcgcagttttggtaatcgaccctagacatttttataagagggcaaggtaaataaaactactttaacaaccctagatagcacaattttggtaatcgacctgaagagtttttataagagggcaaggtaaataaatctgcgttagcaacctcagtctctttctttaatcctttatagccagcgacgaacagattttttgtattgctggtatgctaatccaaacttctctgccataaacgtttcttctggcataatttgaaatcgattcatataaagaataaatatcggcagcataataaaactcgcaatattaccaagatagattccccaaccaactagcattaataacatacctacatacattgggttacggctaaattgataaacgccactggtaacaagacttgctgactgttctggaattcgaggatcaacggtcgtgccttgcttgcgaaattgataaacacctaataaagcaaacaccacacctgaaaatgcaatgagtagtgctacaaaagatgctgcaaaaaacgagaagctaaaactcgtaaacaactctgctgtgccccacatcatcaacgcaatgatcaaaaccagcgcaactgggggcacttttaattctaactgattcacacaagctctcctactttcaatgccttaccacgactaatttgatgacactgtgctaagaataactcggccgttgccatcgcatcagtaagggcatggtgcgagctgtaatgcggtaagttgtagcgcttgcgacattcgcttagtgttaaatcatcgtggccaatttcgtggccttgctggtgcaggcgttttttttcaataacgaaggtatcaagaattaaacgcgcctttgcatctaaaccaagcgttctgcacgcctgttttaagaacccccaatctagtgccgcgttatgaaacactagaatgcactcaccaaaatgctgatgcagcttgccaagaatggtttcgaggctctcacctgcagcgatatcatgtttagcgataccgtgataaatcgggctttgctctaagctttgcacgtctttatttattaagtgctgcgcaccactgaatttgatgcactgatcttctatcattacccacgccaccgaaacaatttcgtgctggcgagggtcaaggcccgttaactccatgtctatcactacatagcgctctttataggcatcagctgccaaaagttgctttcgcgctaaataccgacttaaccagcgtttaaccataccctctcctataaactaccgcgagcaaacttaaatgcggcggcttgctgcgcctgcttaaccaaataaaatgcttcttttaattgatgtcgctccaatgaattcaacgcatttgggttaatacagttgctaggcagcccctcttcgttaatttgcgtgcctaaacgcagttgagttaaaaagcgccaacagtcttttaagttatataggtcatctttattgagtagcgaaaacttcattaacgcgtctatgcgctcttgggtattagcgcgctgaatacccgctttgagggaatataaacgcactatgtcgttaatgatcaccacaccgcgtttttttaagtcgaggtatttatgctgtttatcgtctttttctaatttgaactgattgaacaaaccaatgggcactggggtatttttaatgtcgctcgccatagccgcatagaataagtcattcttagaaatgcgttttagctgctcacaaaagcgtgcatataaggtagtggaaccttctataaaacgtaagtcaaaaaatatcttacaattgagcatcgcctcaggagtcggtgaggtgatccacttatgaaacttttctgtccaagcattaatgcccattcgacattctgcattgctcgccatgatattgccaggacaacgttttattccgcactcaattaaatgctcacagacatactcgcccatacgcttaaagtaatcttgttgttcgtccgttaaatcatcaggtagtaacaagccattatcttggtctgaatgcaatgtttgctcttcccttgcttgtgaaccaaaacaaataaaactaaagctggttggtgccgcgccattatcttcttggaacaaacggattaaccgcgaagtcagtgcatcggttaagccacttaataatttaccaatcaaggagatgtcatcaatattgtttgaaaagccttttaacaagccgggtatctcttgcgaataacgctttaaatctaccacgctatgcgctttataaattcgtccaatcaattgcactgggtcgcttttttgctgacgcagcaaatctgtgctggtgagcataccaagcggtttgtgatgttcatcaagcacaggtaaatggtgaatattgtgcttaagcattaagtgcaatgccgaaaacacgcgattattttcaaaaataaacttgggcttacaggtcatgatgctacttactgactcttgagggtcaacctcatcggccaatacgcgattgcgtaagtctctgtcggtcacgaccccaacgaggcgatcatgctcagttagcataatcgacgaaacaccatgctgtttcatttttttagcggtttgacgaatacttgcctctggcgccaaagtgaccgctttgcgattcatcaattcgcaaatttttttctccgaccaactgtcgttttgacttttataatgagacgacaataaacggtttttatgggcgcgaacaaagtattgctcaaacaccttgtactctcggcgtaagtaatcaaatgccgcttggtttagcatgtaaacaatgccttccttttgcactgaaatgctattttgaatcgcttcgccagttaacagtgacggaaaaccaaagtaatcgccacctgataatttagtgatcacatcgccttttgggtcgactaagtcgtagtcgccagagcgaattaaaaataaccgtaaattatcagagcttaaccactgattttgattctctcgggtcagataaataatatcgagatgattaacaaaatactcgcatgcagcgctatctagctgattaaacggcgtttgttgcatcacaaattgggcgacttcctgttgctcggtattcatggtcattctcgcaataaaatagagacaatatctacactacccctgttttaaataaataaaaagcccgacttaagtcgggcttttgatcttcaagagtgtgttctcataaaatggttttattagtgcgcgtgtgctgcgctagaacctttagggttacggataccttcaaccatttcttggatttcaactggtgtttcagctgttagtttaagtacgatagctgcaactacaaagttaacaatcataccaactagaccgataccctcaggtgagataccaaataaccagtgtgccggtgtattcaattcagggcttacgaacttgaagtaaataatataagccgctgtgaatgtaatacctgtcaccatacccgcaatcgcaccttctttattcatcttcttagagaagatacccataatgatggctgggaagaagctcgccgctgctaagccgaaggcaaaggcaacaaccgaggccacgaatccaggcgggttaataccaaagtaagctgaaatcacaatcgctatcatcgctgctaagcgcgcagcaagtagctcttgtttatcactaatatctggttttaaggtacgttttaataaatcgtgcgaaaccgaggtcgagattaccaatagtaagcctgctgtagttgatagcgctgctgcgataccccctgctgcaaccaatgctacaacccatgctggtaagtctgcaatctcagggttagcaagtaccatgatgtcgcggtcaactttaacttcgttagcgctgtttggatcatcaatcttacctgctgagtagaacattttgccgtcaccatttttatcgttaaaggtgattaggcctgttctttcccagtttttaacccatgctggtgcttctgcatactctgtaccgctaccgtctttaccgttaattgtatcaatcatgtttacacgagcgaatgacgctacagcaggtgctgttgtataaacgattgcaatgaaaacaagtgtccatgcagctgagatacgcgtgtctttaacacgaggaacagtgaagaaacgaacgattacgtgcggtaaacctgcagtaccaaccattaacgcacctgtgattgcgaatacatcaatcatgctcttcgagccttcggtgtattgcgcaaagccaagttcagtactgagcccatctagtttatcaagcacaaactgtcctgagccatcgctaagcgttgcaccaaaaccggtttgtgggaagaagtgacctgtcatcatcattgaaatgaagattgctggaacaaggtaagcaaatacaagtacacagtactgagctacttgcgtgtaagtaatccccttcataccgccaagtacagcgtagaagaatacaatcaccataccaatgtaaacaccggtctcaatatccacttctaagaagcgagagaaaaccacacctacaccacgcatttgacctgcgatgtatgtgaaacagataaagatcgcacataaaatcgcaacaacgcgtgcagtttgtgagtaataacggtcgccgataaaatctggtactgtgaacttaccaaatttacgcaagtaaggtgctaaacataacgcaagtagtacataaccacctgtccaacccattagatatacaccaccgtcataacccgcaaacgagataatacccgccattgagataaacgatgccgcactcatccagtcagcagcggttgccataccatttgccagcggcggtacaccaccacctgcaacatagaattcatttgttgaccccgcgcgggcccagattgcgatgccgatataaagcgcaaagcttaaaccgacgataataaacgtgagtgtttgaacatccattgcttagctcctattcgtctacgccgtattttttatctaacgtattcattttgaaaacgtaaacaaaaatcaaagctacaaaggtgtaaatagcgccttgctgggagaaccagaagccgagtttaaacccaaagaaacgtatctcattgagtacgtctactagtaaaatgccaaaaccaaatgaaacgacaaaccaaattgctaataatttaaatagcagtgcgaggttttccgcccaataagcttttgcttgttcttcatctttaaaagccatttttatccccttatgcattacaaaaaagtaatgagtggtattagttgtcattaactaagttagcaagggttctgatttatggaattgagaccatagtcgtaacagtcagtttacgtttacgtaaactgtaaaacatcatttgttaatgaatggtaaaaaacaataattaacaacaacttaacctataaagataaatttgcgaaatagcgaaaatagtaaaaacgaatgatctgcgacattagtctaataaccgtgcgtaaaacacaactttccatttattatcaacaacttactttttattaatttttattgcaaaaaatctagccatcgaaatcgcgcataattctggtaaggtagtgttattacaataattactgaatttaaacatgacagctgcgcttttatttgttgcactcgcctatattggcgtgttgttttggttggcaaattggggggacaaaaccactcctcttgcaaaaagaattagtcaccatccatttgtttattctttttcattaggcatttactgtacgtcttggacttactacggttcagtcggaacagccgctactaacagttggaattacttaccgattttaattggtcctgcgttgctatttttctttggccaaggttttttgcgcaaattagttttggtaagtaaaaagcaaaatatcaccacgattgccgactttatttcagcgcgctacggtaaacgacaaactaccgccattatggtgacaattatcgctttattagcgacgattccttacattgctctgcaattaaaagctctcagtagtagtttcttattactacaaaacgatagccgtatttcaggctctatgttggcgttatctgcaaccttaatcatggcaatgtttgcgatattctttggtacccgcaaagtggatgttaccgaatatcgctctggactgatgctcgctgtcgcttttgaatctatggtgaagttattagctttagtcgctgtggcaggacttgcactatacactttgtttaacctcagtgaggtacaagcagagcaattaacaggttcagtttggcagcattggcataattttgacttttttagcttcaactttatcggccaatcaatgatggcggcagcagcgattatctgtttaccaaggcagttccatgtcaccgtggttgataaccaagataaacgccatctttttactgctcgttgggcgtttccgttgtatttactgctaactgcggcaatgattttccctattgcaactgccgctattcaccctggtattggcagtggattttcgcccgacagctttgtattagccctaccactgatccatgaaaatgccttcttaacaacttttgtatttattggtggtctatcagcagccacggcaatgattgtagtggctacactcaccctcagcaccatgatctcaaatgatgtggtactaccgttaatgctacgccgtaagtttaaacgtaacctcattaccagcagctataaatcacaaattttattagtgaggcgcttcaccattgccggtattttgattttgtcgtatttctaccagcaatggtttggtcatggtaaagcactggcaagtatggggttagtggccttttctttggtgtcgcaattactcccagccattgttggcggcttatactggcgaaaaggccacgcttatggcgtttatgccggattattagcaggcttcatttgttgggtattattcttaatgttacctattttagatgcgggtaatagcctaaatacggagctgcaacaaacacttattacgcgtggcaccctaatcgccttgtttgccaatattggctgttatattagtttttcgctcggtgcagatgagcgtttaattgataagattcaggcagcagcctttgttaaccctaaagagcaagctgtattcgccagacgcttaaataaaaacgttaaagccaccgtttacgactttaaagtgctgctacaaacctttttaggcgttcaacgctcgcaacaagtgctggctcactttgcgttgtcacataacttagatgacaacaacgcacatccagaccctgagtttatcgcttattgtgagcgagccttaaccggtgtgctaggcgcatcttcagcacaagcgctgatccacacggttgcctctggtaaacgcatggcatttgaagaagtggttaacttttttgatgaaaccacacaagcactgcaatttaatcaaaatttacttttcacatcccttgagaacctcagtcatggtatttcggttgttgataaagaactaaatttggttgcttggaataaacgctatgccgaaatgtttaactaccctgatgagtttctggaggttggccaacctattgaagaagtgatccgctataacgcagagcgcggtgaatgtggtccgggtgaggttgaacgtcatgtagaaaagcgtgtacagcatcttaaaaacggcacacctcatcactttattcgccaccgccgaaatggccaagtatttgaaatgataggtaacccattacctgatggcggctttgtgacaagcttctctgatattactgtgcatatcgaaacgcaaaacgccctcgaagaagttaacatggatcttgaaaaccgcatcgaagcgcgtacccaagaaatacgcaccataaatagagatttacaagcgcaaatcgatagccgagtacaaactgagcaagcacttactttagccaaaaaagaggcagaacaagctaatgacagtaaaacgcgatttttagccttggctagccacgatattttacaaccgctgaatgcggcgcgcctataccttgcagctattgatgataaaaccctttcgagcaacaacttaaataactttgaaaagctgggtgcaagcttagattcaacggtgcatttgatgtcggcgctgttagaaattgccaagctcgagcaaggggcaatgaccccaacgccacgtcattttagtattgatgacatacttgcaccgctaaaaaatgaatacgccattatgtcgagtgaaaaaggcttaaagcttacagtgcgttcaaaagggacaatcgtacacagcgatatcacctatttgcgacgaattattcaaaacttggtgtcaaatgcggttaagtacaccgaaagcggccgagttttaattgcgtgtcgcaaacgcaaacaccatttacgtattgaagtttgggacacaggcccgggtataagtgaagtggagcaagcaaaaatatttaatgacttctaccgtattgaagcgggcgataacaaaggagtcggacttggtttaggggtagtaaaacggatggtcgacttgctttcgctacgtatggatgtcacttcaacgcccggcaaaggtagccgctttagtattgaagtaccatatggtgaaagccaatttattcagcaaaaagacacgcctaaaaaaggcgttgaaaatcgcagtgcaatgaacattattgcggttgatgatgatccggagaatttaaatgctatggcaagtctgttgcaaaaatggcaagccaattatcagctctttgatcaagtagaaactgtcatggcctatgctaaagaccacggcgcacccgatgtgatcttaatggattatcagcttggccatgattgcgatggtattacgctaattaaaacgttaagggaaatttggcaaagcccagtaccggcaattttaatcacagcagtacgtgatgaagcgctaaaacaacaaaccaaagctgagcaaattcattaccttagcaaacccgttaagccagctaaactcaaagccctgcttaaccatagcacttaacaccatgcattccctttatttaaggcaaagcagtaggctttgccttaaatttttggaacaaccaactaagtgcaactaacgacaagcctaagccgataaacgaaatagcacgtaataatccggttaagtttgccatatctatcagaaacacttttaacaccaccagcgctaataaaccaaggcctagcttttgtaaaaccgtaatagtttttaactgccccgccacgaccaccaaagcaccaataataagccaaactaaagagtagctatacagctctgcatctgaggtcggtaaagcaagatttatatactccccttgccagttgtggcgaatttccgcattgatatataaaacactcatcacacctgcaaatgcactaaaaaacttatgcaaaaagcgctgagattttgtcagctggcttgcccaaattgcaatgatggctggaactaaccaaagtaatagtagccaattaataatcggccaactgccaatatttatcggctcaaaaaacggatttacagcggtaaagcttttcagaactaacaatccgcttaatgctaataacgcaaaacctgccacttgatagagcttagctaattgcgcagtaaaacgtgaacgcatcaggtaaacacagcccaatatgccccagttacaggttaataaaatatgctcatacacagacaagttctcaaaatcaggatagtgccccactaactgatagctcgtctctgtggtaatgaataaagcgatacaatgaagcgtagcaccttctagccacacccgaacagattgctgctgccagtgtcttgctgccaagtaaaataagcaagcagacacagggtaaacaactaaactccagtgcacaccaagtaatagcgcatcactgtaatcagctgaccaaggtgcaaaacttaacctaacaagtaaagcaccaactaaaccttttagcggccaagtcggaatactgagtgcatgtttattgacataaaaactgatcaacaacacttgcgcagcgagtgccaaggttaagctactcccttcaagaagcatggttaacgccaaactaatattggcattaccgccaagccagtaactaaatacctgcattggattcgtgctattaattgataacttaaataaccaagaagacagtgccagtaatacaaagcaccaaaccgggtatgccgtcattaaggcatgatcaggagtgatgacatataagcaactaataatcacaaagcctgaaagtgaagcgagtaaggtaaagccaaagcgtttagggtatttacgaccaaacaaaaaaccataaccagcaaacaaagcaataaaaaacagccctgctccgtaattttgtctaaaaacaaaaagctgctcagagtaatcaacagtattgtattgccctgttagcaaacacaccacactcactacagcaattatcagccagtgatcccatgcactgttttttaataccaaaaacaacagtaaagccactaacgacaacatactaagctgccaagtaagcagatcattatggctaatgagtaaaagataaagtggcatgacaactgctaataacagagggttgtcgggcagttgtttcagaagtgttttaaagcggtgtgggcggtattcaacttgtttaatacttagccctaaacgtggaatcgcaattaacaatacaatgctaaacagcgcataaaggttaataaaccagtgtaggtttttagttgcactcattgcaactaagcaataccagcctaaatgccccgcccataacaaataccacagccaatgccgttttacgtaatgtgcgactagcgaagctgatacactgacaaaagcaacataagtaaggagtgcaataaagtcattactcccagtatctacccataaaggcacactgtaagcgccaataataccaattacagccagcacggggccaaaacgtaatgccatccagcttgcagccaaagaaaccaaggttaaaatgctaaatgctggtaaggcttgtagtaagccgtaatgactgtaggccagcaaggtcaatgcaaacaaactaataaagccgccacttgccagcgccgcgggaatatagttgctaaatccttcaaaggtaatacctttacgatgtaaaacctcagctgtaacaattaaactcaggccaaaaatagcgccaagtatgagtcgcatggtttcggataataaaccggcttcaagtgaatagcgggccaaaaagataccaccaaaggcaagtgcaaccgctcctacccaagttagccaattggctttgatttgtgtaactagttggctaactagcggattaaaagttgcaggcttgggtttcgtttgctgtggctttttagccattgcctcagttggcttattgatggcttcaggctttggttctcgttttgaagtgtcggtcagagcttcgtttaaattatcaaacgaatttacaatagttgcttgtggattatggatataggtcgcgttaagttctactcgaagagcagctacttcacgcttcaaactagagagttgaaaaaaggcaataatgccagcaattgagccacctacaacaactagtgctagtaatactagtaacgcaataccgtcgtccatactcactccatgtgtacgctttaaacaaaaaagcaaaaaccttaattgtttatataataaacacttagcaagagtaaagaaacaacgatattgcgttcaagccaattaagactgctcagtcaccgttcgctctaaggtcattttgtaacctgaatcagtggtttcatcatgttcaatcaccaagatatagttaccttcttcggtaaaatccatgtcgctttgttgcaatagcacaatctgctggccgttgtcttcaaacaccacataggttgtataaacttcgttatcaaccacctgctctttttggtcgtattgatctaaaccttcaacgacattactagtatcatcaacggtttcaccattgagagtgaaatacacatcgacttcgtcaatctgttgccctgcatagttatcaattaaattaaccacagtaactgtgtggctatagctgctaggtgttaggttttcttcaatggtcatcatacgagggccgtagtctttgtcattgtagaatagaccaaccgcactttgctcacgctctaatgtcattaagaagttatcaacaatcttgtcgccagcctcatctaacatggctacgctgtaactatttggtgacatactcatgtattcagagtaactatcgttgcttacaacttcggtattggtagacgttgttcctctggttactttaaattgggtttgtgtgtaatcatcaatagtattaataaatcgcaactggccttgtgcgtcttggtggtttagttgagtcaccgagctacttgccgtcactacatcaagggtaatgccgtcttcttctgttgcataacttgggcggatcatcgccatgtaagttgcttcatcattaaaatacaattttggtgattcaaaaatcacatcagtgctaccactggcagtgacataaatagtgtaataaccctcctcaagcgtagatagttctggctctaccaggtactgcgaagtcatcagtaactctgcggtatcaaataacccgtcatcagtggcaatgtaaacatcgtaaatattgtcttctccgacgatattaaaaaagccaacattaaactcatcttcatcgcttgaagatggcacacttagctcagtgaatgttggctcagcaaaatcaccattcattactagcaactgggtttgatcgtctttaattttaatggtttcttcatcaatagtgatatagctatcgttgacatcaacatactgaaaactcagctcatactcacccgagctgtaattatggcgggttgatacatcaccaaaatctgcgcccgaacgttcagtgtcatcaacaaataaacgtgtataggggctattataagagccattgtacagttgcacatagccgctgttgctattgctgctgtcgtcactagaacaggcagccagcaacgaaagcaaacttgtggcaacaattgttttaagcagagtacttttcatggagtttattccttattgtttgtaataatctactttgactcaactaaagcaataaaattctatgttttacaaacgattaccttcacttacagttacttacgttaaggttaaaaagtgtagaaaaaggtatagaaaggcactcattaatcataattatggacagaaaatcacatttatagtgaaagcagcttacttttacacgaaaagtaaataatgattacattttgtaaggttagacaatgaagtcagataaattattagatagttcaatttgcgctatgcagcgctaaaaaattagcaaataatgaggctcacacaaacgggattagaatgaggactatgaacacgattttaaccacacaatgcgatgatgatgttggtctaattgccaagatcaccggtctttgtcatcagcataatttaaacattacacgtaataacgaatttgtagataaagacgctaaacgcttttttatgcgtacagagttaagcggcgttatttcagatgattttttaccaagccttgctgagctacttcctgatggcgcagagcttgcgctgcatagcagtgaaaaaaccaaagtggtattgcttgccaccaaagaagcacattgtttaggtggtgtattacttaagcaattcgaaaaagcattaaacatcgaagtactggctgtgattgccaactatgcagacttagctcctctggctgcaggctttggcgtgccgtttcatgtagtatcgcacgaaggtttaagccgtgctgagcatgatcaacaagtgggtgatttaattgccagctatcagcctgacattatcggccttgctaaatatatgcgtattttaagccctgaatttgtggcgcgctttgaaggtaagattattaatattcaccattcgtttttgcctgcctttattggtgcgaagccttaccatcaggcatttgagcgcggtgtaaaaataattggtgcgaccgctcactttgttaataacgagcttgatgaagggccgattattttacaagatgtgacacatgttagccatgcggataccgctgagatgatggcaaaaatggggaaagatgttgagaaaacggtgttttgcaaagcgctgcaactcgcgtctgaacataaactgtttatcaatggaaatcgaaccgtggtgttcgcttaagcaataaaatgaagaggctgtatggcctctttattgttgttattatcttttgttatgccgactcaataggctctagttgtaatttagaggcaattaataccgcttgagtacggttatacacacctagctttctaaaaattgcagtaatgtgtgctttcactgtcgcttcagaaatatgtaactcgtaagcaatctgtttgtttaacaagccttcgtgtaagtattgtaaaactttatattgctgtggcgtaagcgatgcaacttgagcggcaatttctttatcttcgccatcaacatcagagactttatcttttaattctgatggtagccacacatcaccctcaagaatgtggttgattgccatggcaatatcatctgacgatgatgattttggaatgaatcccattgcaccataggccattactttagagacaacgttaatatcttcgctgccagaaacaacagcaattggtaagctaggataatcttcgcgaatgcgaataaggccgtataaatcgccattgcctggcatgtgaaggtctagtagtaagatatcaagatcttcttgttcgtttaacacctgtaaagtggtctcaaagttttccgattcaaacacttctaaatcagcgaacttagcacttaatgcccctttcagcgcttcacgaaataacggatgatcgtccgctattaaaaactgactcatggttcactcctaataaattcggctgacacctatttctaagtgacagccgatatactacgtttagaatcaacttctaatcaagtttttaacgtgattttaacgatttaatcggttttcgattagttcatctaccacacttggatcggcaagagttgatgtatcacctagctgttgatgctcatttgccgcaattttacgtaaaattcgacgcatgatcttaccagaacgtgttttcggtagacccggagaccattggatcatatctggtgaagcaattgggcttagttctttacgaacccagttacgcacttcttttgttagttcatcgctcactacaacaccctcatttggtgtgatgtaaacataaatgccctgacccttaatgtcatgcggataaccaactacagcagcttctgctacagcttcgtgagcaaccaatgcactttcaatttctgccgtacctaggcggtggcctgatacattaagtacatcgtccacacggccagtgatccagtagtaaccatcttcatcacggcgacaaccatcaccggtgaaatacacaccagggtaagctgagaaataagtttgttcaaagcgttcatggtcaccataaactgtacgagcttgtgacggccagctatctaaaataacaaggttgccatcaaccgcgccttcgagtgtattaccttcagcatcaaaaagtgccggtgcaataccaaagaaaggacgagttgcagagcctggtttcatatctgtcgcacctggtaacggtgtgatcatgatgccaccagtttctgtttgccaccacgtatctacaattgggcagttttcgttaccaatgtgctcgtaataccaagcccacgcttcagggttaatcggctcacccactgaacccatgatacgtaaactattgcgtgttgaggtagctgttggctcatcacctttcgccattaaagcacggatagctgttggtgcagtgtaaaggatagtcacgttgtgcttatcaatcacttcacccatacgacccgccgttggatacgttggtacaccttcaaaaaccacttgcgtacagccgtttactaatggcccataggcaatatagctgtgacctgtgatccagcccacatcagcgctacaccagaagatatcgtcttcttttaggtcaaacacgtattcatgtgtcattgatgcataaacgaggtaaccaccggtagtatgaaccaccccttttggttgacctgttgagccagaggtataaagaatgaaaagcggatcttctgcattcattggctctggttcacactcagcaggtaggtcagcgacaagttcatgccaccaaatatcgtggctattccactcaacttcgccaccggttaactgatgcacaataacgtgttcaaccgtagttactgagtcttgtgataccgcttcatcaacatttgctttaagtggtacacagttgccagcacggcgaccttcgtctgaagtaattaccactttagcgcctgagtcattaattcggtcagcaatcgctgatggagagaaaccaccaaataccacagaatgaatcgcgccaatacgcgcacatgcttgcatagcgtaaatagcttgcggtgtcataggcatgtaaatagcaacgcgatcaccttttgatacgcctaactttttaaggccatttgccaattttgctacttcgtcgtgaagttgttggtagctgatattttcgctgtgttcagggttgtcaccttcccaaataagggctgttttatctgctttagtagcaaggtggcggtcaatacagttatatgaagcgttaagttggccgtcttcataccagcggatgctgatgtggcctttgtcgaatgaggtgttttttactttattataaggagttgaccaatcaaggcgtttaccgtgctctcgccaaaatccttcagggtcatcgatagattgcttatacattgtattatatttatcgttatcaactaatgctgcattcttgatatgcgctggtactggatagatactttctgacattgttgtcgtctccattttaattacttgccttcggcctgcctcaaggatcactcagcaaagcccctgaaagtattagaccttagttgtatatcttgtcatttcacaaaaaacttcgaaatcgccttctataatctagttcaatgttcgcaggtaagcgattttgagtcgcttaccaccttagtctaatagaccaatagataattgagagaagtcatttcttaaacaacagtgatacaacaacattaatgcaatcaacaagtagcttcgacaggaatacacattatgacaacaacaaaagtaaccgcattaaaaacactgacagcttcggctgttttatgtgcacttgcaggtaccgctaacgctgcaaccattggtaacaccgacgtttcttatggtggctatgtaaaactagatgcgatgtggagtgattactctgcaggtgtaccagccggtggcagcattggccgtgacttctatgtcccaagtacaacacccgtgggcgcagacagcgacagtgatgctgtctttgatatgcatgctcgccagtctcgatttagcctaggcacagcaactaaattagatgatgggaaaacaattaaaaccaaaatagaaatcgatttccttgcttctgcaccaggtggaaatgagcgtgttacaaactcatatgcaccgcgtatacgccaagcatttgtaacttatgatggatggttatttggtcaagcttggtcaaacttccaaaacgttggcgcccttcctgaaaccttagactttgttggcccagcagaaggtacagtgtttgctcgccaagcacaaattcgctacacaacaggtaactggtcattctctgttgaaaaccctgaaagcacagtcactgtaggtggtgctcgtgtggcgactgatgatgcctcaatgcctgactttacagcacgttatgcccataaggctgattggggtgagcttgttgtaacaggtctggcacgccagcttacttataaacaaaatggcattgatgcggatacatcatcgtttggtatcagcgcatcaggtaaagtaaattttggtgaaaataatcttaaatttatgcttacacaaggttctggtttaggccgctatgttggtttaaatgttgctcatggtgcagtacttgatggcgatgatcttgatgcgattgattcaacatctggctttattgcttatcaacaaaactggagcagccaatggcgctcaaccttcctgtattcattcttctctgctgataacaatactgacttattagctatgtctatagacccaacaaagacaagccaaagctttagcgctaacctattgtattcaccagttaaaaaattgacttttggggttgaattcaaacatgcagaacgtgagcttgaaagtggtactgatggcgatatggatcgtctgcaattttctgcaaaatacgtgttttaaagttaaaagttttacttcctgaagcggcttcggccgctttttttttatcaagcgtttggattctcctgcgttgcatttttaaaaacatttcaagccctacaaaaacttaattgcaaatcgttctcatttagtttagattacgcgttaatttcattattaattgaactaattggaactttgcatgtcatcaacaaaatttttgcgcttatcgcagttaagcctagtgacctcagcactacttagtggacacgctttagctgaacaacaaaaagaagaacaagctattgaaaaaatagctgtttatggccagcatcataaaaattacatcaccgaagaagcacagtcagcaactaagttaggactaacaattaaagaaacaccacagtcaatctctgttgtttcacgtgcattaatggatgatttctccctcgataacctaaatgccgtattagaaagcactcctggtgtgactgttgaacaaatcgaaactgaccgtacttattttaaagcccgtggttttgagatcaccaacttccaagttaatggcatgggtatgccacaagataacggttcaatacaaggtactctagatacctctatttttgatagtgttgaaattgtacgtggtgccaacggtttaatgacaggtgctggtaacccatctgcaaccgtcaacatggttctaaagcgccctacttaccaaacacaagtaaatgcatctgtatcgtatggttcatgggataacaaacgtctagagcttgatgcatcaactgctctcaacgaaaaccatgcagtgcgtgctgtattcaccaagcacaaaacagagtcataccttgaccgttacgagcaagataaaacaatttattacctagcctacgaaggtcagcttactgatagcacagttgtaactgctaactatgtaaatcaaaagaaagatgccgacagcccactttggggcgcgctaccgctttattatagcgatggtactgcaacaaactttgatacctcaactagcacagcgtctgattggtcatattggaataacacaacagagcagttgttcttatcaattgagcaagcaattaccaatacttggttcttaaaagcaagctacgcacacttagaaaatgagcaagactcagaacttttctatgtttacggtaccccagacagagaaacaggtcttggcttaacaggttacgcaagtgaatatgaccacaaagataagcacgacattttagatatttacgcaacgggtaaatttgatttatttggtatggaacatgacctatcttttggcgtaaaccaagcagatattgattacaaagataaatcactgtatgactacacgactggtaatggcttccctgcaatgccggagctaggtgggtggaatggtgttgcgccagtgccaacacttactgatggtttaacaggtgctgatatcaccagccgtcaacgttctgcgtatatttcaacacgtatccgtgccacagatgctttcagtattttagctggtgtaagccaagtaaactgggaaacagagggcgagtcatatggtaaagcaaaagataaagacagtgagcaaactgtgccttacttcggtgctgtgtacgatatcaacgaaagcttatcaacttacgcaagctacactgaaacctttgtgccacaaactgaacgtgacatcaatggcgattacttagacccaatcacaggtaaaagcagcgagattggtgtaaaagcacagctacttgatgataacttatttgttactcttgcctattttgatgctaaacaggaaggtcttgctgttgccgtgccaggttcacttcctgatgatacacgttattatggtgctgatggcataaacagtgatggttttgaggtagaattaagcggtcaaattaacgataccttgagtgcgagtttcagttacagtaatttaaatattgatggtgatgacctagttaaagactacacaccagaaaatcaattcaaacttgctgtaacacacaaagtacctgaagttgatggcttaacttttggcttaaattatcaatggcaagacgacaccaagcgtgtacaaattcgtgatgctgatactaatgcccctctcattaccacaacgcaagatgcttatggcttattaaatctaatggcgacttatgacatcaatgataatgtaagtgttaaccttaatatcaacaacgtcactaatgaaaaatatcttcatagcctgttctgggcacaaggctattacggcgcaccacgtaactactcagtgtctttcaactggcagttataagctttgagctagaagtttaaagcttaagtactgaaaagccgcatcatctgcggctttttcatgaaagagttgcaagagtaaagttagaaaagggaaagttacagtcactatcgcgtgttctgacagctgaaagctacacgcaaccacagaataccgccaacaatctagtgattaaacgcgatataaaatataagcacccataaaaaaaccgctaacaatgtagcggtcttttttgtgttaagtgcgggtcaaatcacgcttaactgtactctttagtagtgtttatagctcgtcttcagctattaggcctgcatcttcaccatcttctggttgtacagttgcctgtagtaatagcatctcacgtaacttaccttcgatctcatctgcgatctcagggttatcttttaagaacttaattgagtttgccttaccttgaccaactttattgccattgtagctgtaccaagcacctgatttttcaacaatcttatgcttaacacctaagtcgattagctcaccttgcttagaaataccttcaccatacatgatgataaattcagcttgtttaaacggcggcgcaaccttgttcttaacaactttcacgcgggtttcgttaccaacaacctcgtcgccttcttttactgaaccaatacgacgaatatcaatacgtactgaagcgtagaatttaagcgcgttaccaccggttgttgtttctgggttaccaaacataacaccaattttcatacggatttggttgatgaaaatacacagcgtatttgaacgcttgatgttacctgtaagcttacgtagtgcttgtgacattaagcgagcttgtaagcccatgtgtgaatcacccatgtcgccttcgatttcagctttaggtgttaaagcagctaccgagtcgacaatcacaacatcaacagcacttgaacgaactaacatgtcacaaatttctaatgcttgctcaccagtatctggttgagaaacaagtaattcgtcaatgtttacacccagtttttgagcgtatacaggatccagagcgtgctcagcatctacgaatgcacaggttttaccttgcttttgagcttcagcgataacttgtaaagtaagcgttgttttacctgatgattcaggaccatacacttcaacaatacggcccgtaggtaaaccaccaatacctaatgcgatatcgatacctagtgaacctgttgagatagcttcaatgtctagggctttgttgtcgcccagtttcataattgagcctttaccaaattgacgctcaatttgtgataaagcagcatctaaggctttttgtttgttatcgttcattctgttctccaaatccggctaatgcagacagtatactgtatgaaatcacagtatcaagctaattttctgattttatcaattcaattacagtttttaatgaataaacaatagcttgcagtctaacttcagctctatctcctgagaaaacctgttcgcttgggtagttttttccggcaaaatgaatacaaaaccataccagccctacaggtttatccagtgttccaccaccggggcctgcaatccctgagatagcaattgcaatatctgcgtttgcagcttttgcagcacccgatgccatttcaagcacggtttgctcactgacagcaccaaaattgtttaatgtttgctcactaacacctattaattgctgttttgcttgattgctataagtaacaaacgcacggtcaatataattcgaactgccgggggtatcagttaacgcataactaacgccaccaccagtgcatgattctgcggtagtgatccataagcgtttatccgttaaaatagctcctaatttcgcagcaagtgttttaatctcttgatgtaattccatattcagcctttgggtaaatacatgtcgtttgatctttatgcaccgcacactataaaacaacaaacccctatgatgcagcagtatctaaaaataaaagccgagcatcgggatattctattgttttatcgtatgggcgatttttacgaacttttctttgatgacgctaaacgtgcagcgcaacttcttgatatttctcaaactcatcgcggtaaagccggtggtgatccaataccaatggcaggtgtgccttatcatgccgttgaaaactacctagctcgccttgtacaaatgggtgaatcagtagctatttgcgagcaaattggcgaccccgccaccagcaaaggccctgtggaacgtaaagttgtgcgtattgttacccctggcacaatttctgacgaagcgttactacaagagcgccaagacaaccttctgaccagtgtttggcaaaacaagcaaggcttatatggagttgcctatcttgatataaactctggtcgattcaatgtattagaagttaatactgatgaagcatttagctcaacattacagcgtttagcaccggcagagttactttatagtgaaacctttgcgaatgtgcacttaattgagcacattaaaggtgcacgtcgtcgccctgaatgggaattcgatctagatactgcgcagcatttactgtgcgaccaatttggcactaaagatctggttggttttggtgtagacaaagcacatgccgctttagtggctgcgggctgtttaatgcaatacgtaaaagatacgcagcgcattgccctgccgcatattcgtgccattacccttgagcaaaacgaacatgcagtgatcttagatgcagccacccgtaaaaatcttgaacttaccgttaacttatcgggtggttatgaaaatacccttgcgcaagtacttgataaaacggcgacagcgatgggttctcgcttattaaaacgccgtattcatacaccggtgcgcagtaaaacagagctcaactctcgactcaacgctattagcgccattattgatgcgcaattatgtggtgaactgcaagagtcgttaaaacaaattggtgacattgaacgtgtcatcgcccgtttagcactttgtaccgcaagaccacgtgatttaacgcgcctgcgtagtgcactgcaagcactagcaccactacacgaattactgatggatgctaatgacccacgtattagccaaatcattgctcagtcgcaacagttacctgaactacaagatttactcgaacgtgctgtaatcgaaaccccaccagtacttatccgtgatggtggcgttattgcaccgggctataatagtgagcttgatgaatggcgtgcactaagccaaggtgcaaccgatattcttgaaaagcttgaagagcgtgagcgagagcgcactggcattagcactttaaaaattggctacaacaaagtgcatggcttttttattgaagtaagccgcgccaattctcatttagtgcctgcagattatattcgtcgccaaacgctaaaaaacaatgagcgttatattatccctgagctaaaagagcatgaagataaagtacttggtagccaatcaaaagcacttgcgcttgaaaaacagctttacgagcaactgttcgaatttattgctccgcacattgaacagttacaaactatggctgccgtactggctgatttagatgttttaaacaatttggcagaacgagcacaagcgcttaattatgctaagccaacactgtgcgataacgataacatcagtattaaacaaggtcgccacccggtggttgaacaggtaatgaaagacccgtttattgccaacccagtggagcttaataacgaccgtaaaatgttgattatcacaggtccaaatatgggtggtaaatcaacctatatgcgtcaaactgcacttatcgtgctaatggcacacattggctcttatgtgcctgcagatagtgctgaaatcggaaatattgaccgtatctttacacgtattggggcaagcgatgatttagcatcagggcgttcaactttcatggttgagatgacagaaacggcaactattttaaataacgccacagcacaatcactggtgctaatggatgaaattggtcgcggtacttcgacctatgatggtttatcactagcctatgcaacagctgactatttagcttcaaaaattgccgctaaaaccttatttgcaactcactattttgagttaacagagctggccgaacaaaaaacagggttggtaaatgtgcatttagatgccattgagcataacgacaccattgcctttatgcatactgtgcttgaaggcgcagcaagcaaaagctttggcctacaagttgctgccttggccggtgttccaaaagcggtgatccaacaagccaaacaaaagctaaaaatgctcgaaaaccaccaacctgtcacggcccccattgagcagcaacagcaaacattaagttttgatgatgaaccgtctgagcttgaattaaccttaaaacagcttgatccagacagcctaacgccaagacaagcacaccaactactgtatcaattaaaagatttactgtaggtataacatagatataaaaaaagctgacgcaatgtcagcttttttgtgtgttctagaccctaaagcctatgtattgttgtctaatttgctatatatcaggtgaattggtcaaataagctatcagtgcttaaaccttcatgttgcaatatgtcttttaagcgacgtagtgcttccacctgaatttgtcttacacgctcacgtgttaagccaatttcacgaccaacatcttctaaagttgatggctcataaccgagtaaaccaaaacgtcgagcgagtacttcgcgttgtttagggtttaactcacctaaccaatcaacaatgtgtttgttaatgtcgttattttgtacttctccctcaggaccagagcctttttcatcggctatgatatcaagcagagctttatcgttttcaccaccaataggagtgtcaactgaagttatcttttcatttaaacgcagcattttagtcacgtcttcaaccggcttatctaagcactctgcaatttcttctgcggttggttcgtggtctaacttctgggttagttcacgtgcagttcttaaatacacatttagttctttaactacgtgaattggtaaacgaattgtacgtgtttggttcatgatggcgcgttcaatggtttgacggatccaccatgttgcataggttgaaaagcgaaaaccacgttctgggtcaaatttttcaacagctcggataaggcctagattaccttcttcaataaggtcaagtagtgcaaggccacgattgttataacggcgggcaattttcactactagacgtaaattactttcaatcattcgcttgcgagaggcttcacagcctttcaatgctttgcgagcaaaaaatacttcttcttctgcacttaatagtggagaaaaaccaatttcacctaaatacagctgggttgcatctaagtttttagcaacttcgtcttttgcaaatatatcttcttcgttatcaacttcttctaatagttcagaagcatcatcttcgactaccgtgtcatcaaatttatcgtcaatcgcgtcagttgttttctctagttttgctgtgtgacccataagcgtcctcccgagcaaatatgtgattgagctaaatcacttttatcaataccctaatggctaaggtagatacttagcaggattgactgcttgaccccgataacgaatttcaaatctcaaagccgtaaccgaagagtctgaactgcccatttctgctattttctgccctgcctttacttcctgtttttcctttacaagcaacgttgaattatgcgcgtaagcacttaggtaatcatcattatgtttcaaaataattaaattaccgtaacctcgcaacgcgttacccgcgtataccacagttccgtgtgcagcagctaaaacagaagccccctctttgttagtgatctgtaaccctttaaagccgttttctttattagaaaagcgtcgcgtgaccttgcccttagccggccagctccatacaactttagaattagaattaccgtttttgtcactaattattttgttggcttgtttctgaacatactctcgttgttttggctgatcaagctctttctttaattttttgttatttttttgtgtggaaaaagtagactttttactcgaattcgtatattttttcgcctttttgtgtttttgttcctgctttgtaatcaagatacgttggccgggaaagatagtgtaaggtgctggaatattgtttatttttgcgagggttcgaaaatctcgttgagaactaaaggcaattgaatataaagtatcaccctttttcactgtgtattttgagcctgtgatatttactttgcgcgtcgtcggctttacatgattatctaaactactgaccggagcgggtgcttcgcgagacgtacagccaaagagcaaaatactagtaaacaaagtaacatagactgttatctgcctgctcatcgtaaaatgctccttatcgtactaactaatggttttatggcttatcgtagtaaaaagtacgcaaccaccactaaaacaaccaatccccagccaagggcttcaacatattgacgtaatttttgctccattttaactccaccccatttcattagtgccgaaacaagaaagaaacgtgccccacgaccaacagcagaagcaagtaaaaatggcaaaaatgccatctgcattagacctgcgcctatggtaaataccttataggggataggcgaaaatccagctaagaaaaccacccaaacaccgtaattctcaaaccagcttagggctgtatcaaatttagcttgccaacccatttgcgcaataagaggttcaacgactggttcgaataaccaaaagccaagtaaataacctaaaataccaccaaccacagaagcagtggtggtaaaactggcaaagcgccatgctttatctggctgtgcaagcgacatcggtgctagcatgacatcaggcggcaccggaaaaaaaacagattcagcaaaactcatccctgctaaataacgctcagcatgtcggtgtttagcccatacaagcgccatatcatataacttagtaaacaacttcaaagtattaggtcctattcaatatcaccaggcaccaaaggtacaaatctcactggtgcaactttatgttctgtaaatgtgtcgccatttctaacaaccatcattaattgctgatcttgctcaccaatgggtgcaatcatcacgccaccatcagcaagttgttcaagtaatccgtgcggcattgttgctgccgcagcagtgacaatgatcccctcaaagggcgcttgtgactgccatccttgccagccatcgccatgcttcatggtgacattgtataaatcaagcttatgtaagcggcgcttcgcttgccactgtagtgctttaatgcgctcaactgagcacactttggtgaaggttttagctaaaatcgctgtttggtagccagacccagtgcctatctcaagcactttatcgcgaaccccagctaaacgaagtaactctgtcatacgtgcaacaatgtaaggctgcgaaatagtttgcccttgaccaattggtaatgcggtattttgataggctttatgctgtaaaacatcatcaacaaagatatggcgaggcgttgttgcaattgcctctagcacgacactgtcttcgacaccctcgcgctttaataattcagctaatgcaagtgcactgcgattataattagtcagcaccattaatctccatatttgctaaccagctatcaacggcttgtaggctttctttagccgtcatatcaacactaagtggtgtgactgatgcgtagccattattaatggcataaaaatcagtgccttcccctgcatcactttcagcacccaaggtaccataccagtatatatcgcgaccccatggatcttgctgtttagtcatggtttcggctttatggcgtgctcctaagcgtgttactttcacgccttttaattcaacaagtggcacgtcaggtacgtttagattgataatttgatcttttggtaacgggtgcgaagctaattctttaatgatactcacagcaacagcggcggcggtttcaaaatgatccccttctttagaacacaaagatacggcgatagccggaagccctaaatggcggccctcggttgcagcagcaacagtgcctgaatacaaagtatcatcacctaggttggcaccatgattaatgcctgcaaccacaagatccggctgctcatccattaactcattgacaccaaggtgcacacaatcagttggcgtgccattaatggaaataaaaccattttctaaggttgttgcacgcagtggattcattaaggtcaatgaattacttgcaccactgcaattacgatcaggtgcaacaagtgtcacatcagcaatttgggtcagggcttgatataaaactgcgatcccttttgcatttacaccatcatcattacttaataaaattttcatctacgcatccttttgtttttgttcttttgggctggcatcttgatagtccaccagctcacgcaacaaggctgtggcaaaacacccttttggtaacccaaagctcagctttaatgttgtctcgtctagggtttcaaccgctaatgaatctgggatcaagcgtaacattctacgctcgtttttaagaccaagttcgctaaggccagctatccaagactgataaggttcgagccacgttttttcggcctcggtaaggcctttttcacctttaccaaccataggggccgacatcacgatatcgccagacgctaagcgggcaatattatcgtcgctaatgttatcttcaaaaaaggcattgctgccacttaacataaatacttcgcggtgcatggttttcgcaaggccatgttcagcaacgcgcaagctcacaatttcattaaacacataagagcgcgctgcagagatcactaaacctcgtaattttttgtcgcgaatacgctctccggcaaacatgcgttttgccatttcaaggttgtgcccaccatgaccaaagcgttgttcaccaaagtaattaggcacaccggcacgcaccgcgttaatacggcataaaatatccagtggttcagtcacattacgtaaagtgatggtgaagcggttgcctttatggcagccggttctgagtttgcgattgtggcgctgttgcgaaataacaaaaaactgctcgttattcagttcactaaattcaatatgctttttaattggcactggcacactaaaccattgtgtacatacaccatgacggtcttttaagcccgcataactcacatcacgcggggaaacaccggctttttcagcaatacgtttagcaacaaactgagtgttttcacctttttttaccacttgtaagcagacatgctcaccagagcctgtaaactcaatgcccaagtcttcatcaaccataaaatcttcggcagtggttttaaaatcagctttcgaaagaggtttgccgtaaaggtaatttagttcactcatcaatcttgttttctcataattacaacagcatggcttgagataccttctttacgaccttcaaagcccaacttctctgtagttgttgcttttacattcacttgtgaaatatctgcttcaaggtcttggcataagttttcacgcattgcttgaatatgtggcaacattttgggggcttgagcaacaatcgtgacatcggcattgccaagaacgtaaccttgctctttagcaagcccaaccacgtggcgtagcaaaattcggctatcaatattttcgtattcgctcgcagtatcagggaagtgcttgccaatatcgcccattgcaagtgcacctaatattgcatcgcataaagcatgaattgccacatcaccatcagaatgcgctaaaaagccttgtggataatcaattttttcaccacaaatcaccagtggcccttcgccaccaaatttgtgtacatcaaagccatggccaattcgaatcatgaggtactctcgttttgttgtttttgcaataaaaatgctgctaaatctaaatcttcaggggtggtgattttaatattatcactgcgaccagcaaccagcttaacaggctgtttggcccattcaattgccgatgcctcatcagtaatagtcacaccactttgaagggcatttgatagcgcatcggtcagcaatttgtaagggaaaaactgaggggttagcgcctgccataaatcgtcacgtggcactgtttgctcactgtgggtatagccgcgctttatggtgtcttttacttttgatgccaaaataccgccttcattggcagcagtacattcagcgattaaacgctgaatatctgccaagcacactaacggccttgccgcatcgtgaacaagtacccagtcaggtgggttgtcagcaagtgatagcaaggcgtttagcactgaatcggcgcgttctttaccaccactcacacgttcaattcgcgcatctatatacggtaaatcggcaaaatagccatcatcatcactaatagcgacttttatggtattaaggcattcaagctcagcaagcttgcttaaggtatgctctaaaatagttttacccgcaagctcgatatattgtttaggcgccgaatgttgcattcgactccctactcccgcagcgggaacaattgcggtaataatttgtttattgttcattatactgctgacctggtaatactcgaataaaggtttcaccaggtttaatcattcctaattcgttacgcgctcgttcttcaataccctcttgaccaagctttaaatctttaatgtcggcttttagtaccgtattacgttttaataatttagcattcgtatcttgatgtgatgctacggcttgttttaaacgagtgtaatcttgcactccattatggccaaaccacaaacggtactgaataaataatgccaaacataacaaggcgaattgaaaaacccgcattgaacactccttcgcggttaaattaagtcaaagggcgttttagattacgccaatttatattacttgctagtagcatttctcttaatgacaaacgcttaggtgttatgcgcttattgtattgccactgatgaccacagcatgcagctgtcataaccaattttgatggctttaatatttgcgctggtatgtgttctagtgactctcccgacacatcaaaccaacctagctcattacaatgtaccttattgtcgcttacttgatctaagctgtctgtgcgcacccttgtacattgctcatcattaattaacacaggaacaattaacccgcgcttagcatatttagtgtaaaaattttttgagtcttctttactgtagaccggaggcgatgccttttgtttctcgagccaactaccattttgcgaatcaagttgtaatggtgcatcaccgcttacgatacgcatcgctaaacgctctatgtagtaaggcaaacttgctaataagcgttttagccttgctgcatctggttcatcaactaaccgtgggatctcacgagcataaaacgcgttacataactgtgcatacaatgctcgttcggcatctgtttgccaaatttcagcttgttgtgacgtttcactttgtgaatgagaaatagacaatgcgcgctcttataaaacaattgcttgactgttttatagcatagagcgtttattgagcgctactttactgcaccttttttacccagttttgcattaccagattctaaaaactgcaccacagcatcacgctttttacctagtaataaactaccatcggctaaaaacataaagttttgccaacaacgcttaaatacggcaaagctggtttcgataatattgtcgcgcgccatacaaaaatacacggtcgtattggcttcccactctaaatggttaaggatttcttcaggtagttgctcatcacccgcttcccatgcattttcccagttaacagtttcagaaaaactgtcatctttaccgcaccaatctgttttatcaaaaaagtcagggtgatcatgctcacggcttaccatagtggtccataaaaccgctgcgcgctcagctgtcattggttttatttgtgcggcatcttctgcgcttatcggcatatctttatgacgaaaaacccaggcttttttgtattcatctaacgaaatataattcatagtttaggcagtttgtttcagggtaaaatgtgcaaactgcaattatacccaaatgactccaagatgcgagataaacacatgacaatcaaacccggcatttaccaacactataaaggcccaaaatacaaagtagagtatgttgccacacacagcgaaagcaatgagccacttgttatttaccaagcgctatacggagaatttggtatgtgggcacgcccgcttagtatgtttacagaaacggtcacagtagagggtaaaaccgtaccacgctttgcatacctttcagacgccgactaactgtggcatcatgacgttattaatcactgctcagaccagataaggtgacatcgtgctttttaattcaaccgataactacattgccagtaattcattaaaacaagcggttaacgcagctatcttgctcgaaaagcccctgcttataaaaggtgaacccggcacaggtaaaaccatgctggccgaagagcttgccaaaagcttagacaccacgctaattcaatggcacatcaaatcaaccactaaagcgcaacaaggcctgtatgagtatgatgcagtatctcgtcttcgcgacagtcaattaggtgatgagcgtgtgcacgatatcagcaactacattgtaaaagggaaattatggcaagcctttacttatggtgagcaacataacaaacgccctgtgttattgattgatgaaatcgacaaagccgatattgaatttcccaacgacttgctattagagctcgataaaatggagtttcatgtttatgaaaccggtgagcgcgttgttgctaagcaacgtccgattgtgatcatcacgtcaaataacgaaaaagagctgccagatgcctttttacgtcgttgttttttccattacattgattttcctagtagtgaagaaatggcgcaaattatcgatgtgcatcacccgcatgttaaacaagatctagtacgccaagcacttgaggtgttctttaatctacgtgaagttaatggcattaagaaaaaaccatctaccagtgaattactcgattggttaaagctactgatggctgaagatatagacgctaaaacactgcatgataaaagccaaaaaggcggtttaatgccaatgtttggcgcgttattaaagaacgagcaagacattagcttaatcgaaaaacttgcgtttatgagccgccgttaagatgttaattgcgtttttctttaagcttcgcgaataccgcttacctgttagtttgcgagaactacttgatttgatcaatgcgctcaagcaaggggttatttttgccgatgttgacgcgttttattatttagcgcgtaccatcatggttaaagatgaaacccattttgatcgctttgataaagcctttgctgattactttagtggcgtggccgaccttgatctgctcgaaagcttaaaacagcaacatgccttgcctgatgattggctgcgtaaagagtttgaaaagcacttaagcgaagaagaaaaagcgcaattacaagccatgggcggccttgataaactcatggaaaccctcaagcagcgccttgaagagcagcaaaagcgccatgcgggggggaataaatgggtcggtaccggtggcacttcaccatttggcgcctatggttataaccctgaaggtgtgcgcattggtcaagacggtaaccgacatcgccgtgccgttaaagtatgggataagcgcagctaccgaaaccttgatagcgaccgtgaaattggctcacgcacaattaagcttgccctaaaaaaactgcgtaaatttgcccgtactggtgccagcgataccctcgatttaaccgaaaccatccgcgcaactgcaaagcaaggcggcatgctcgatgtaaaaatggcacctgagcgccacaatgcagtaaaagtattgatgctgtttgatatcggcggttcaatggatgattacattcatacctgcgaagagctatttagcgccgctcatagcgaatttaagcacctagagttttactattttcataactgtttgtatgagcatgtttggcaagataatcagcgtcgtcactcaaacgtaattgataccatgaccttgattaacaagttcaccagcgactacaaggtgatctttgttggcgatgccaccatgggcccctacgaaatcgcctaccccggtggcagcgttgagcattggaatgaagaacccggcagcgcttggctaaaccgcataactaatcactttgataaagtcgcttggctcaacccgcaacccgttgaacactggcgctattatcaatcaattgattttataaagcagttaatggataaccgtatgtatccactcacgctagatgggattagtaatgcaattagggaattgagttagagccgtcaaacagcataaaaaccgagacatgaatgtaaagttacaattgtttataaacacaaataactaagccccttctcgatcagctataaactgacggctgaaagctgacagctccctttacattaccttccaaaccaaaaacaccagcgcaaagcctactaaataaaccaagcctagccagcttagggtgcgtaataaaggtgagtgatgaatactggcttctgagcgcactaaactaaagttcagccacgcaaagacaggggtcgtgacaaaagcgagggtcatagcaaaagtaagcattgggccaagggccgatttaaagaataaaatcacagccatgccagcaaatgcttgcagtaataaccacatatttaaactgtgtttagactgtttaatcggtagcagtttatgcgactcatttaatgttctggcgtagccatcaagcactgttagcgtggtgccaaacatacataaaaaagcgatacctgaaaccagtggccttgcccactcgcccatagtgagggcatacatatcaattagctgctttgcaaaggcaacgccacctaattgcacagcctgtgcttgaccatattgcactaatacacctagtgagaaaaatactaacgcaagtgctgcggtaagccagtaacccaagttaaaatcaaacaagccttgttgttttgtcagcgcttgttggtgctgcttttcttttagccacagtgagctaattgctgatatttcgataggagcaggcatccagcccataagcgccaccataaagccaagcatggcaagctcataaggcgacgggcccacgtagtcaacaggagccataggaccattattaatagcgacaactaacgcagctaaggtggtaaccgttaacagccccataattagctttgaaacattatcgagcgccttaaaatgccccaacaacaaaataagcaaacacacagctaaaatcagccagcataatagcgttacagaaaccgtaacaggcaatgcgtagtgcagcaggctggccgttaataataaaactccagcggtgttcaccacagcggcaacaatattaagcgcaataaaactatagaaataccccggccctttttgcttgtagccctcaactaaactttgtttggtcgcaagggtgtactccatgccaaatcgaaagaatgggtacttcaatacattaactactatgattagccaaaataattgccaaccgaataacgaccctgcttgtgttgatgccactaagtgtgagccaccaatggcggctgtggccattaaaatacccggccctaatgcatttaatttagattgccaatttgatactgctgattgcatatgctttgtgtgttttattctgagtaacaagcaacttacagcgttttaggtgagattggaagcagagcacgttagcaagttagctaacgaatcaagtaactcgctaacttttggaacttcaatctgacggctgaatattaaaaccaaaaaagccaaccgtttcacaacggttggctttcttagtttgattgtaaacgctagattctagctaaacctagcgcggcactttattaagtaaaattaagttaaatccatttcctgaataatttcgtgggcaatttccggagttgtactgaccggcttttcgtgtagtttggctttcatttgccctttacgatgtttcaatgatgcatctagtttttttgcagcatttgcaattgctgggtacatcacctcgtcttcaccttttactgataagcgtgcgccttcataggtcgtgcttatctcagcttggtatttgtgatgctcttttgaaagaataatatcgagagatattaatgatggaaaatggctagcaattttcgagaacttctcgttgatatgagctctaacagcctcagtaacgtcaacatgatgaccagaaatattaatcttcatagggtatccttttttcttgttacctcacagttagtattgggggcgaattgaattaacacaagcgaaaattgcagataattagtaattgattgtaaccacagatgatttagatcatgcgttgcggataaaatatgcaaaagcccgcatcacacgggctttttataaaggttaacaacagttcattaagtgtacgaacaacagtagtcagcaaagtctgataccttcacgcgaaatgtcacgtgtgcgtctacgttaaatgaatctccagctttcatggcttgccactcagtttcgccaggcagtaatacttgccactctcctgctagtaactccatatgctctttctgatttgtaccaaactcaaattctcccggctgcataaagcccaatgttttagtgctgccatcggcgaatagcacaacacggctcgaaactttaccatcaaaatagacattcgctttttttacaacacttacactgtcaaactgagtcatacttactcctgttatgttttattattaacgtataaacattgccagttgtcggtttagcattcaagagtggctgggtgagaaataatcaagtcgggttagctgtcagttttaagccgatcgtgcaattgtggtaggtcgtgctttagcacggcaaatgtaataatagttttaaaagttgccttgaacatgaagcagacttgcagtaccaccagtagtgttttctatttgatatctattattaagctctctggtaatgcatacaacaaagaacgttttattgaacctttgaaacctattcgatcaattatttctttttttaatttttcggcttcatcaatacttaaacgaggatctagcatgagttgatcaactacttcatgagaatcaaattgatatcgaaataagtcctcagcataactgctaacatcgtgctcgaaatagattagtcttacttcattttcatgcttgaaagcaggcctttttacacacaatgaagatgctaaagaaaatgttctagtacctgcttgttcactaaacacttctgatgcaaagaatttgagttttgtgcttgtaaggtatctcactcttccaataaagcacttctcatttcttaatcctatacacgctagagaatcatgaccttgtgaatcatataaactattaaataactttctaattgtagttcttattcttactgagcatttatcctcagaatagattctccacatggcatcagatgctttactaagtgtccaacattgaccatagaacccacttttatgactaaaatcatatgttttgccattattaaatcgcactttagattttaaaaaaaaatttccaaaaggatcatcccacaaacttggtttaactagtacattttctgagttttcaaaaagctcataaagtcttgataaaggaataatcctgtatatatttttatctagttctgaatcttgaatattaatgaaatttctaatcatatataccaattttattgttatattttatcagtagtttttcgccaaagtgtatttgcaatagcattcattgcttcaatcacttcaagtatatatgcctgttttatttcaagatgaactctagcatacctgtggtagttcaaatttgagtttttttcaacaatacagaactgttttctgtgcaattcttcatcaatatgcgcagcattatgggcaataatatttctgatatcccgtgcttctctaactttttcccaagatgatgttccgacatctactttaaaatcagctattttatttaagtatctgtaagctctctcaatacctgtaccgcgacactctctgagggtagaacataaatttctttcaaagtgtaagctatggcataaatgattaaggtagtcctcaaaaatagaaactaacattaacaaaaacgactgcctttggtattgtgggaatgttgattgaatatgcgcactcaaatcatttcggtatctatacttatcccagtatattttttcattagtttctatatcagagttattatactcaaccaactcctcattccagtgaatttcagatatcctagaaaacacacgaaaataatctaagtcattcaagaaatataaggatacctgatcagatttttgcataacatctaccttatgacagaaattattttgaattaacagacctgtaaatttctatttcttttgagtcaccttaacttataaatccagaaaatccaatgagtgttatttattctaatctagctgcaggtattaaaccaactagaatgacttatcacgcgaaataaatttcacgcctacggtgagatatttttaaaactgatggctgaaagctgacagcttagaatgtgttggacttcaatccgttatacccaacctaacagctctgagtgtgttggactcattccactcccaaaaccggcataaaaaaacccgcactgtgacatacagggcgggcttttaaattttagtggcttaagcttagaacaaagcgtttgctttatttacgatgttttcaacagtgaaaccaaagtgcttgaatagctcgcctgctggtgctgactcaccgaaggtcgtcatacctactactgcgccatttaggcctacatacttgtaccagtagtctgcgatacccgcttcgattgctacgcggcgtgtaacgcttgctggtagtacgctttctttatacgttgcgtcttgctcatcaaataaatcagttgaaggcatagataccacgcgtacttttttaccttgtgaacgcagttctgcagctgcatcttgtgcaagctgtacttcagagccagttgcgataaggataagctctggctcaccgtcacagctaagtacgtaaccaccttttttcacatcagctaactgctgtgcagtacgcgcttgttgctcaaggccttgacgagtgaaaataagtgacgttgggccatctttacgctcgatagcttgttgccatgcaatcgcagactctacttggtcacatggacgccagttcactaggttaggcgttaaacgcatgcttgcaatttgctctacaggttggtgcgtcggaccatcttcacctagaccaattgagtcgtgcgtgtatacgaagatacttggttgcttcattagtgcagccatacgtactgcgttacgtgcgtattccatgaacattaagaatgtagcaccgtaaggaataaaacctttatgcagtgcaataccattcataatcgctgacataccaaattcacgtacgccgtagaaaatgtagttaccgcttgcatcgtttgcttctaagccttttgagccatcccaaagtgttaagttagaaccagcaaggtcagcagaaccgcccatgaattctggtagtaacggaccaaacgcgtttagtgcattttgtgatgctttacgtgttgctgggtttgcagggtttgcttgtagctcttcgatgtaagcttgtgacttttcagcccaatcagctggtagctcaccgtttgtacggcgtttaaactcagcagcaagctctgggtatgcacttgcataagcggcaaatttttcatcccagctagcttctagttgcttacctttttctttgccatcccactcgctgtagatttcagctggaatttcaaatgcatcacctgtccaacctaggaactcacgagatgctttgatttcgtcttcacctagtggtgcaccgtgacagtcgtggctacctgatttattaggtgaaccgtaaccaatgattgttttacagcaaattagtgatggtttatcagtaatgctacgtgcttcttcgatagcggcgcgaattgcatcagggttatgaccgtctacatcgcttactacgtgccaaccgtatgctttgaagcgcgctggtgtatcgtcactgaaccacccttctacttcaccatcaattgagatgccgttgtcatcccaaaacgcaactagtttacctaggcctaatgtaccggctaatgaacaggcttcgtgagaaataccttccattaaacagccatcacccataaatgcataggtgtagtgatcaacaatatcgtggccttcacggttaaactgtgcagcaagtgctttctcggcaattgccatgcccacagcatttgtgatcccttgacctaatggacccgtagtggtctcaataccaggcgcataaccatattctgggtggcccggtgtttttgagtgcatttggcggaagtttttaatttcttcgagtggtaagtcatagccacttaagtgcagtagagaatagatcagcattgaaccgtgaccattcgaaagaataaatcgatcgcggtctgcccactctggattcgtagggttgtgctttagataatcgcgccatagtacttctgcgatatctgccatgcccataggggcgccagggtggccagatttggcctgttgtactgcgtccattgataagacgcgaatagcatttgcaagttctttgcgtgatggcatgaattctcctacctttatgtatttgcgctggttgtttatgaagctccattcttacttattgtaagggtacagtgcaattaaaaatccgcattaaatgcaccgtttatgggcgtttgttaagaacaatacgttattagtaattttaaatggacgtctaggcgtaaaattactatgcaaacatatttgttttagataaaatacgccccttatttttttagcgctattaccgacgtttgtggagcgcaatatttgtgagcagaaatacaatggcaaaacatttatttacttctgaatctgtttctgaaggtcatccggataaaatcgcggaccaaatctctgacgcggttctagatgctatcttagagcaagattctcatgcccgtgttgcatgtgagacatacgtaaagactggtatggttatggttggtggtgaaatcactactagcgcttgggtagatatcgaagaaattacacgtaaaactgtacgtgaaatcggttacacgcactcagacatgggcttcgatgctgactcgtgtgcaatcctaaacactatcggtaaacaatctccagatattaaccaaggtgttgaccgtgctcgtccagaagaccaaggcgctggtgaccaaggtttaatgttcggttatgcatgtaatgaaactgacgttttaatgcctgcaccaatcacttattcacatcgtctagttcagcgtcaggctgaagttcgtaagagcggtgagcttaattggttacgtccagatgcaaaatctcaagtaacgtttgcatacgaaaatggcaagcctgttggtattgatgcagttgttctttcaactcaacactgtgattcaatctcacaaaacgacttagttgaagcggtaatggaaactatcattaagccggttcttcctgctgagcttatctcaagcgcgactaagttcttcatcaacccaactggccgtttcgtaatcggtggccctatgggtgactgtggtcttacaggccgtaaaatcatcgtagatacatacggtggtatggctcgtcacggtggtggtgctttctctggtaaagatccatcaaaagttgaccgctcagctgcatatgctgcacgttacgttgctaaaaacgtggttgctgctggtcttgctgacaagtgtgaactacaagtttcttacgctatcggtgttgcagagccaacatctatcagcatcgaaacatttggtacaggtaaattagatgaagcacgtctaatcgaattagtgcgtgagcacttcgacctacgcccttacggcttaatccaaatgcttgatcttgagcgtcctatctatcaaccgacagcggcttacggtcacttcggtcgtaatgagttcccttgggaaagcacagacaaagcagacgcacttcgcgcagctgctggcctgtaataggttagaaaaatgaaaaaagcgccgtttggcgctttttttgtgtttgatttaaaggtaggaaactattttctcgtaaacagccacaccccataccaaggctaaaaccaccagcgacaatgtcactgccgcagaggccatatctttggctcgcccagataatacatgatactcaatgccaactcggtcagtcagcgcttctattgatgagttaagtaactcgacgattaataataataaatagggaataaacaacactaaccagtgattaagtgactgcgccaatacgaccgacaagggtaacaaacacagtcctaaataaatttcagaacgaaatgcagactcttctttaaacgccgctttaaagcctttaatcgagcatttagttgcttttaaaatgcgtccaacaccaaggccatttggcttattgaccagggggatttttggttctttcattttttacctactgcctcagaattaacctgatcataataataaactcttacactgtcaccataagacccttgttttaattgctagcaattaccggggatgctgctggttttggtgcgcgaaaactgattattagttaactgctctctgagcgattgtagtgttttataaacactttttaatgacactttgttacttaaccaataagggatagagccactcggatctgcataagcttgatggctcactaataaatcattttgttgctgttctaagcgccaatatgcagtgaggtttttaattcgtacaacccctgccacttctgcttttgcatagggctggcttttaatttgtagctcagttttatgctcacctaaagcgcgataacaagagtaactcaccaagtctcgatctgataccggccaaggcgaattaaagtgggtataaacaagagtttctgagggacttaagcgctccattaaggttacgcttttcacgttttcgagccaattaggcgcgttttctgtatcacttaataacgccataaagtcactcgctttggcgtttttaaccagcacagaagcattaatttctataatgccggtgtcatgctttttataactaaccttgatgtcgtcttgttgcttgtagacttgccattcaattgggttagcacaggcagataaactcagccaagctaacccaactattaagcaacgacgcactttatttatagccagtaagggtctgtgtcaaatgtagcgtgacggctttgctccattgcacttactaaaaattcagatttttgatccaaccaagactgtatttttgcaagttctaaatcttcatgaccagcacacagctgttttagatactcaagtgtacttagttcataaataccatgagagatatctaaccatggaatacgaaactcactacggtcgtctttgttaaatagcgctcctaaacaatttccactaagcagagagttttctaggcgcgtgcgcagtgctaagtaatctttgtctgtaaacactttttgctctggaatgagctcatgcatatcgtgccaatcttttgcaaataatcgctttgcaatatcagcaacgggctcttcagccgctttaaactcagcttgtccccatgatttacgccactgtttttctatcaaccatgtagttagttgtaacaataaacgattatagcgagtactatgaaacagctcttgtacatcttcgatgcttggttgtaactgttttaagtcgttgataacttgcgtgagttctggcgcactattaatttttttataataagcgtggcgtttagacgtgtaggtttttaactgaattgcattttctacccacgctagttcgcttagcagccattttagctctgtacgtaataaatcagtgtcatctttacttactatgtcatcaaacaaccagaaggtgtggcgaatcaaacgaattccatcggtcacacgtttaagggtttttaggcttggcttgatgaagtaacaagcttcatgtttttgcacaaagcgaattgcatagttgatgctttctataagcgcttgctcttgcgttgcatcacgctttaacggcacaaaaccaattgatttgcttgcttttaacggattgtcatcagcaaggcgataaccacgagctgcttttgagtataagcctaaacgcacattactttcgcgcactagcttatcggctaaagcaaataactcttggcgactaccttctactagctcaacttctagttcagaaatgggttcaactttgcccgacgcagaaatctcacctttatcaagcactacttcaatctgtgcaccgctgtcagtttcgattaaccatgtacggcgaataaaattagtactaaaaattgggtataggttatcggctattgacccaacttgcataccatgcggccaaattgcagcatcaaaagcaagtaaatcagggcgtgtaccctcaagcggtaagttgtattcagggcgttgatgtaaaccaccaaccacttcgcctgcaagcttaatggtttgctcgcattggttatcgcagcaacgcgtacgtaaaccaatatctaatgcgcgcaattctcggcttggtgtatcgtaataagcattttgtaagctacgtgagggcttgtttgtaacggtttttgcaaattgagtaattaatgcggggatcagtggaacaacggcatctgacaccaaaaacttcagttctatctcagtatccattcgctttgcggagtacatttaaaataattaagtgatcaaaataaacaaagcagctacttaatgcaaactttttcctgaattttaatcttgagcttggctatggattacaatatcttccttgctattaatagttgaaatccctactatctctatacataaagaaattataaatttggccatttctaggcaatggttacgttaacaaggtagattgatgttaaaacagtgtatttttgggttgctcctagcggccacctcttttattagttacgcagaagaagcgccaagcagtaacgaaaacaccgcatacatagtcgataacctctacacctttatgcactctggtccgagtaaaaactaccgtattttaggttcggttgatgcaggtactcaagttactttactgtcagctgaagataatggttattttaaaatccgtgacgacaaagatcgtgaaggttgggtagaagcaaaatttgtgactgaaaatgcaggtattcaacagcagtttcaagcattaagtaatgatatgactttaatgcaagagcaactacgccaagcagaaattgaactgcctcagttacaagagcaaaataaaaccctcacagagcaaaatcaagcactaagtgagcaaatccaagcgcttaaaaacacaattgaatctgagcgcaacgctaaacaaacagccagtgcaaaagaaaaacgtcagctacttacctatggcggcgcaattgcatttattggtttattgttaggtattatccttaccattatgttgtcgcgccgtaagcgatatgatggctgggcataatctatcaacaataaaaaagcaccgttaggtgcttttttattgtctgcttaatttagatatcaaagagcaaaccactgtcttgcttgattttctcaatcaccatataagtgtgatgggtgcctacccccggtatatcaactaaatcacccaatacctgacgatattcatccatatctgaaactcgtacttttaataagtaatcgtagccacctgcgaccatatcgcactcaacaacttgtgggatatttaaaatatattcgcgaaatactttaaacaccgatgtattcgatgtgacaagtgatacctgtacatgtgctaataaactttgatttagttttgcttcacttagcttggcataatagccttcaatatagccctcttgttcaagacgctttacacggtcaagacatggacttgggcttaaatttacctgttttgccaggttcacattagatattctgccatttttttgcagagcgtctaaaattgctaaatcgatgcgatctaacatgcgtaatctattcggactagtcataacagaattttatgcggctaagttaacggtatgccctgtaaattatcgtaaatcgaaaaatataaccagcatattctgctggattttaattagaatgcacgaaatatatcaatggcaagaaatgcgttaattgtatttctcgactccacacaccagagggttacatatgctatttaatggcgatttgacaactgaatgtccaataagacaaaaaatccgtgatttttaccgtattgatgaaaacgcggtaattgatcatattttgcctttggctgaagtaggcgtgaaagcgcgtagccgagcgtgggaacgtgctcgtcaaatggttttaaatatccgtcgcgatcaggatggtcaaagcggtgtagatgcactacttaacgaattttcactatcaagtgaagaaggcgttgttttaatgtgtctagctgaagcactactacgcgtaccagataaagcaacgcaagagtcgctaattcgtgacaagcttgctaaaggtgactggagttcgcacttaggtagcagtgactcattatttgtaaatgcatcatcttggggtctgttagtaactggtaaaatggttaactacagcgacaaatctaaagaacaacaatttggtgtgctgaaaaagaccattggtcgcttaggtgagcctgttattcgtaaatctgtgaacttcgcgatgaagatcatgggtaagcaattcgttatgggtcgtaccattgacgaagcgattgaacgtgcggcagataaagaacaaaaaggctacgtttactcatacgatatgctaggtgaaggtgctcgcacaatgaaagatgcagagcgttacttcaacagctacatgacggctatccatgcaattggtaaagcggcaaatggccgtggtcctatcaagagcccaggtatctcagttaagatttctgcaattcacccacgctatgaattcactcatcgcgagcgcgtaatcgctgaaatcgtacctaagttaaaagaacttgcccttgcagcgaaaagctacgacatcggcttcactattgatgctgaagaagctgatcgtttagatatctcactagatgttattgaagctgtatttagtgatgacgatttaggtaactggaatggttttggtttagctgttcaagcataccaaaaacgcgctatttttgtggttgagtgggttgctgatcttgctcgtcgcgttggccgtaaattaatggttcgccttgttaaaggtgcatactgggatacagaaatcaaaactactcagcaagatggtttagatcactaccctgtatttactcgtaaagcgacaactgacgtttcttacaaagcctgtgctatcaagctacttgaagcacgtgatgtgctttacccgcaatttgcaacacacaatgcttacactgcagcaactattttagaagttgctaaaggcgaccacgaaggctttgaattccaacgcctacacggtatgggtgagtcgttattcgaccaaatcgtaacccaagaaaaaattcaatgtcgtgtttatgcgcctgttggtcaacacgaagacttacttgcatacttagttcgtcgtttattagaaaacggtgctaactcatcattcgtaaatgcgattgttgataccactaagcctgttgagtcacttttacctgacccagtagaaacactgcaaggtttacgtaacaagtacaacacgcaaattaaaatgccaattgatttatatggtgaagaacgtgctaactcaaaaggcatggacttaactgatatcaatgtcatcactccatttaaagaaaatctagatgcatggtttgcagagcatcgtattgatttaaatgatgtgcctgaaggctctctagcagtgaagaatccagcaaatcacaaagaagtgattggtcatgtaaaacttcactcttccgaagagatgacagcattattagaaaatgcagaaaaagcatttgaatcatggtcacaaacgccggttaaagagcgtgctaacttactacgccgtattgctgatattctagaacgtcatcacgatgagctagttgctatctgtattaaagaagcgggtaaaattaccaaagatggtattgatgaagttcgtgaagccgttgatttctgccgctattacgcagctcgagctgaagaattagcacaagatgagcgttttgaagcacgtggtgtgatcttatgtatcagcccatggaacttcccattagctatcttcttaggccaagttgctgcagcgatcgtgactggtaacacagttattgcaaaaccagctgagcaaacaagcttaattgccttacgtactatcgagcttatgttatctgttggtttacctgagcacgttgtacaacctgttatcgcacgtggtagcgatgtaggtaaaacaattgttcctgatgagcgaattcaagctgttatgttcacaggttcaacagaaacaggtacgcttatttcgcaaacacttgctgcgcgtaacgatattcaagtaccactaattgctgaaaccggtggtcaaaactgtatgatcgttgactcaacagctctaccagagcaagttgttgacgatgtgatcagctcaggtttccaaagtgccggtcaacgttgttctgcacttcgtgtgttgttcttacaagaagatgttgctgatggcatcatcgaaatgcttaaaggcgcattaaaagagctacatgttggcgatccttcgttactttcgactgacattggtcctgtaatcgacgaaaaagcactgaaaaatttaaatgaacatgttgaatacctaaaaggtaacgcaacacttcattatgagtgtgaaattcctgataacaacgaaaatggcgcttatttctttgctcctcgtctatatgagatcaaagacttatctgtgcttaaacgtgaagtatttggcccgtgtgtacatatcatccgtttcaaaggtacagagcttgataacgtgattgatcaaatcaatggcactggctttggcttaacgatgggtgtgcattcacgtatcgaagagcgttgtgaatacttagcgaaaatgtcgcgtgcaggtaacgtttacatcaaccgtaacatgattggtgcgattgttggcgttcaaccttttggtggtcgtggtctatcaggtactggtccgaaagcaggtggccctaactacttacaacgtctagtgaaagagaaagcatcaccagataacgtgcaaatgacaaacctaacacctgatgagctagatactcaccactattcaggtgcggctgagcaagttgctaagttaatggaaaactcattacgtgatgagaagatctggcgttcaacaccgttaaatgaccgagtttcggctgtgcgtcaattacttgctaaagttgcaaccgttgaaatcattgatgagcttgctgatgacttagcattaacccttgctgatgcacgtgcgcagcttaaccgtcttgaaaagcacatgcgtaaacacactgtgttgcctgggcctacgggtgagtcaaacacgctacacttagaaccacgtggttgcgtagtatgttatgcagataagagtacgtcatttaacttctgggcaatttctattatcactgcacttgcggctggtaatactgttatcactgttgcttcagagttgttctatgacgaagctgtggcgtttaaagataagtttatctcaacaggtattgcagagggtgtattccaagtagctaaacctaatcagttacaagctattttagcgcatcctcaccttgctggtgccgttgttgctgcgcgttcatctcgcttaggctatttcagccagcagttagcacaacgtaaaggtgcaatcctgccggtaattagctctgagtactacgatacgctaatcaaacgtctactaactgagaaaacaatcagtatcgacacgacagcgtcaggtggtaacacatcacttatgacattggttgaagacgacgagtaaataagtttatctaacttattgtcacttctaagggcctccagcttgtcagctgggggctttttttatagtcgtttttaaggttgcccagcagtttaaaacaccattaagtactattaatatttactgaaatacacattttctgctagtttaatagtattgtatctgagcagaagtaaaggccttgaaaacactccctatcaatcaacttaaacctggcatgtttgttcacggcgtgacaaaacagacaggcaagatccgtataaaaaaccaaggttgggtaaaaacacaaggcagtattgataagcttaagcaagctggtattttagaaattgaaatcgatcctgataaaacgctaaatctagatagtgacagtaaaatcactgaaaaaccaaaacctgcagcaccagccgtctcttctgagccattcgatccatggcacactacgcacagtatgtcggcagagatgacaaaagcaaatagtctttatacagaagccaaatcactccaaagcaaagcatttgcagacattcgagaaggaaacaaaattgatgttgccccttttcaagagctagcaagcggttttatcgattctgtgtttagaaatcaagatgcattaacctgtatcactcgcatgcgagaaaaagatgcttacttacttgagcattcaattaacgtgtctattttgatcagcatttttgcaaagcatttaggtatcgaaaaatcgattattcaagaacttgccaccggtgcattacttcatgatatcggcaaaattaatatccccgataaaatactcaataaaccaggtaaattgactgatgaagagtaccaactcgttcaaaatcatgcacgctttagcaaagaaatattagagcagtctggcctcagtggtattgccgttgatattgcaggctttcaccatgagcgcttagatggtagtgggtatccttttggtaaaagtggcgatgaaataagcctgtatgtacgtatggcctcgattgttgatgtgtatgatgcattgaccgcggaaagagtctacaaggcaggaatggagccaatcaaagcattcaaaatattaaaagatggctgcccagatagtttcgatggtgatttggtcactaaatttattcaatgcattggtattcacccagttggcacattggtaaggctagaaagccaaaaacttggtgtggttactcgcagcaacccaacaagcccacttaaacctcaagtgaaagtcttttatcacgctaaacatacccgatatacagaagtacaagatatcgatttagcaaacagtcgctgccacgacagccttgaagcagcggtcagaccgagtgaatttaacatcgatctaatccgttttttcaaaagctctattctaccttaagcttgattcatcatgactggctactcaggccagtcttgcagtgcttttaaagtgaattcatagccatcatagctaagtaaactctgctctggcgtgatttcgattaacgataacacaccgatattatcaccttcataaagctcacgaccattgagttttatccaacgctttgatggctcagatgcgtagatgtgcgcttggtatttaagtgttgggattgaattttgaatagactcagggagcagctctatcggatcagcataagacgaatttttagtactatgcgttacctgcgaagaacgttgttggtcaacatcctgaaccgcttgcgcaaaagctttttttaacgaatccgacacttcgtttaactcatcatctggctcagcttgcttagtttgattattggcgttctcatcaaggggcttaccaagtaccttgtatttgctgtaatcaatgccattactatttgtcggctgtggtgcagcttgctgcatttgcatcggctgcgaaaactgtggctgcggctgataagcagcttgattttgatacactggctgggcatattgcggctgtgcttgatttgcataaactggcactgtgtttacaggcacttgtacccactggtactgctgagcaccttgcacaggaacttgctgcatcatggtttgttgctgagggggttgttgcatcatttgctgttgtgccaccacaggttgcgaaccagacggtaatttagctacagagttatctgtttgaagttgctcttgatctttagaacccgcaacattttcagctgtcgcactgggtactttttcattctcatttgctagtactggctgctcagcaaatggcttactttgctgtaaccacttaccaatcgaaaaaccagccattagcgttaaaattgcagccagtaataacccaaatgaaaaggctaaacgcttatagcgtgttaactcttgctgctgtttaagctgtaaagcagcctgatcgtgatcaacggctgtttgctcatgttgagccgattgttttattgcatctaaaagtaatgacataattgatcactcgttaaattaggtaggataaaccaatacccattcctaatacggctaaaaatgaaacaggataaagccatacatagctcggctctcgagcacctttaggtataacttcagtgctggttggcggcaatgcctcttcggctgaacgcatcacaagctcactgtctatggtaagtttttgctgcgaaaaagcccccaccaaacaacgctcacacaataaattgattaatctaggtacgccctgagtaacttgataaatcgcttttaacgcatcacctgaaaacaaggcttgctcagtgcccgctttaaacaagcggtgcttgacataggcaaatacttgcccttcagtcagtggcagtaggtggtaacgtgccgtaatacgctgggcaagttgtcgaagttcagtacgttttaaaagctcctgtagctctggctgccctactaacacaatttgcagcagctttttgtgatcggtttcgatgttggtcagtaagcgcaactgctcaagtacatctggtgcgagtaattgcgcttcatcaataattaagatggtatggccaccagcttggttatttgcctcaaggtgctttttaatcacatcagtgagggtttttaatgtggcattgtcactgtcgtaatcaattttcaattcgtcgcaaatactggcaagcaactctagctgcgacaaagctggattatggatttgcgctacttgggtgttttcaggcaactgctcgtgcaggcttcttattaatgttgttttacctgtaccgacttcacctgttaatagcacaaagccacccgcttcaccgagtccataagtaaggtgtgccaacgcctctttatggcgttcactcagaaataaatactcaggattgggggcaatcgaaaaaggtttttctgacaagccgaaatagcttaaatacaccgtgatattccttgcgtttaaaatcaccgcctataatggcaaaaaacaacgctacttaaaaccttgttcgcattttattgaacaaataacgtaaaatactgaaaacacaaaattgaaggtgatctatgcaggtttatttagtcggtggagcagtcagagacgctctacttggtcgtgaaattaaagaacgcgattatgtggttgtcggcgccacacctgaacagctaataaaccaaggtttccaacaagttggcaaagattttccggtgtttttgcacccaaaaaccaaagaagaatatgcgcttgctcgcaccgagcgcaaacaagggcaaggctatacagggttcatctgtgatttcactccagaggtaactctagagcaagatttaattcgccgtgatttaaccgtcaatgccattgctcaagccgaagatggcagcttagttgacccattcggtggtcaagatgacatcaaaaagcgtgtattacgtcatgtatccgatgcatttagcgaagacccattacggatattgcgtgtagcgcgttttgctgctcggtatcattacttgggctttacaattgcccccgaaactaaacagttgctcattgctatggttaaagcgggtgagcttacaactctcactgcagagcgagtgtggttagagtttgaaaagtcattaagtgatggtgcatttagcgattttttaaatgttcttgcaagtattggtggcctgagtgtgatcagtgcagagcttgaaaaacagtggaatgaggatacttataaaacactcaaagctcggttcgattatgctaataaccatcagttgcatgataccgcactcttattcagccaagtaacgctaagtttatctagtcaggaaattaacagtatcgcaaatacaattcgcttaccgaatgaagtacgcgatctggctattaacgcgcaaacccatcaagcggttttagctagcgaacagcctagttgcgacgaggtttttaactgctttaaccagcttgatttatggcgacgcccagagcgttttaaacaggtacttaaagtgttagaaatcagtttacagcaccccgtaccatgccatgagtcgttaacacttgcagcaaatcaagcaaaggctgttaaccctcagcaatttatcgcacaaggtattaaaggggccgatataaaaaccgcgctcgaacaagcgcggctcagcgccattagtcgttacttctcgtaacgtacaaggcgtaaataaatatccgatgttttagcatgtaaactgttgatacctttatcaaactgatacacccacgctaaatcactgcgagttataccggatgtgctactccagtagttttgcagcttagttgataaaaatactgtttcgttaatgctaggctgcacacaactatgctctaagatgcttgcaagttctttaatattaggaacatgccaatcagaataaccagcgaatgtagcatttttagcacctcgtagcgcttcaccccatgttaattgctggctggtgccttcacatgcatcaatatcgctattatagctttgcccaaaagtacaacgctgccacatcaaacccgttttaatatcgctaacagtaccatcgatatgcgtgacaaagcggcttgttggggttgtttcggttgctgcatcataacagacctgagcactgacaatgctcggtacactaaccagtaaagtaacggctgcagatagatatttcatcattttactctcccggagttcttactaaacgcacaaaagccgtgttgccttttggataagctaagtcattcgcgttactcatatttatgatataagcttgcgacaaactggtaccatccgctgcagtttgtgaagtccagtacggcatgaatgcactgccgtcagtacttaattgcattgcatttggctgattggggaaaaactcagttgatagtaaacttgtaccaccttgtttagcataatcgagtaacccgagtaactcagtataagtaggaacacgccaattcgtgccgccgcagaagtcagtggcattcacttcatttacataagtttgtaaaccacacgatgttgcacttgggcaagttgaatttgcagcgccttgaacgctgcctgcttgaatgccgtttgaagtcgttaaataccaagtatagtggttagtcgcagcgcgagttgttgtggctggaggcagtgctgtgcttggggattttacttcccaaattaatcctgtaacgttatctcgaacacaactaaatgtggtcgcatcatcaggtagttcatcagcaaattcattcatttttgtgaaatcgaatgctaaatcgccctgaccaattttatccagttggtttgcaacgctatcgcgaccaagatccgcatcttgatctggaaaatcagcgctcttacagtttattttttgtgaattgttatagcaatcactcatgccagtatcgttaattaaaccaagcggttttgggctaatatcgatagtcaccgtgtcggtgtcactacgcgatttactgtctgttactgttacttcaaagctaagctcggtatcggtatcaacatcaggggcaacaaaagtggtaatacactgattttgattagcaagagtgactgtttcgccactcatttgctgccaaaaacactcttttgttgcggtaacaatttcgctaccactggcatcaagagtgaccgtatcaaactcaattacttgttgatcttcaccggcattggcaataatcacttcaagagttttgtttaaggtaaatgtttgctcggtactggctgaaccgccttcgtcatcagtcaccgtgagtcgccaagtaattggcgtatttgattcaagtaatgggtgggtaaaactgattgtttgattttcaaagctatcaacgatgagctctgggccatcgagtttattccaaagatagctgtcaacggagccattttcgtcaatatcgattgactctgcaccactgagtacgattgtgtcgttatactgtgatggcagctcttcaggggcaatttgagtgattacagcgaccggcaattgattattagaggtgataaaaatactcacctcgtcagaaaccagttgcccatccgtcgtttgataattaactctcagaataagctctgagtctaatttaatatcaggagcagtcagtgtttgctcagcaccttgtgctggaaagccttcaataacaggaccactgacgcgttgccatgtaaacgtaccatcagcgggagagcccttcgcagaaacggtaaactcacttttttcgataatttgctgatcaagacctgcattaacagtcgctgcaagtggggtttcacttgaaccacctcctccgccacaggccgatagtgccgttaatgcaacaaaggtaagaagcactaatctcatatttaccaccttaaattaaccacgccaatttattaggaactgacaaataaggaaataataagcaaattaagtgccaagctaagggttataggtaactttcttggtggatacggacaaacaatttggtaccgactttactgtagtctactttgtactctctgccatcaagggcttgaataaacagtaatcgcttttcttctgcaaacacatcagtgcttgaaatataaaccatttctaaataacgttctttggcttcacggcggttttttggcagttcatctttgaacggctctaggccattttgggtcactttaattcgtgggtgagtttcgccattgacgatcaccaagtcgagcttcttatctttatgaataatcgtgttgcgaccgcttttaataaaagcacgttcttgactcatagcctgttcctacttactaccacctactgcttattatttaagcgagtattaataaacttgtttgggtttaacttccaacgatttaaatctgcactaaattgccaaatgtcagtatcaagaacattggcaggcaataataaatcatatccagtcaattgccttaaatgctgcgtgcgattagcaaacatagcaatcaatcctttgtaaagctgaccacttggggcagtgtattccgtgtcttctataagccattctgatgggcaatcgccatttttgcaatgatttttaataacttgcataaataaatgacgttgctctatcaataatcgcccggcaattctgggagggagctgcgttaaaaattcatctatattattgagtttaataccaactgcgtttaactcaaggtattcgaggtctagatgcacttttggtataccactttggtaaaaattatcgcgattcagctgccaattgccagctttatgatgaaaaataagtaatttcccagaaaaagtaaaactataatatggttcttgagtctttaaaaagccaatgaaaatagcggcaatacaacttgttgctaaaaatatttcgataatgctgatctcacctggcctaagcaggttgatcaacataataaacaccaacccaatgcccccaacaagtaaacattcaataccatgtcgagatgcttgggctcgcactcgcaaaataggggcttgcttatccataaaacgaaaaataaaaaataaacataacaatagtgaccaaaactatctttcggatcgttaaacaataattacactttggttctttacccacaccaaaacctctcttttcatctcataaaaggaacaaatttgccgaacttttaacttttacgccaaattcacaaataaacgagatatctgacatacgtggcacgtactaattttgtacactactctcaactaattttctggtaacacgatgatgtattctacacaatccggtaaagctctttttccttttattatcacactattgctagggttatgtatttatttgtacttaccttcaagtcaaggcgagcaatcaaattttggcgatcgcacaacgcaagtaaaagcacacacagtcaccgctgaagaaaacgcagtgcttattgaagcaataggcagcgcacgtgccaatcaggctatttacatacgaagcgctcaaaacgattatgttactgacatctttttcaatgatggcgacttagtaagtaaaggtcaaaaactcgtacaattacaagcacaagaagaagaactcgccgttaaagagttaagtatcaacctacgcgaagaaaaacgccaattagaccgtctaacggagctttcacgctcgcaagcaaccgctaaatcgttattagaagagcaactttcacgcgtagacgcaaccgaagcacaacttgaaagtgcaaaaacaaagcttgctgaaatgaccatcaaagcgcccttcacaggattacttggcaagcgcgaaatttctatcggtacttacgttaacaacactaccaacatcaccacccttgatgatatcagcatcattaaagttgattttaaagtacctgaaaagtacttagcgcaattacaactgggtatgaaagtgatgacgcaaaatgatgcttatcctgataaaaccttcacaggcaaagtgacccacatcagctcgcgcatagattctgttactcgcagcgttgaagtcaccgcaagctttattaacgaaagcggtttattacgacctggtatgctgttaaacaccgcattggagctaagctcaagtcaggcattaatggtgccagaaaaagccgtaatccctcaacaagacaaacactacgtattccaaattgaagacggtgtagcaaacaaagtagaagtacatgttgctggtcgtcatgacggttgggttgctattgataaaggtcttgaaaatggtcaacaagttgtgaccgagggcattattaaaattcgtaccggcagtaaagttagtatcaagggataaaccatgaaaattacagatactagcgttaaacgcccggtttttgcgatcgtaataaacctgttattactcacctttggtttggtggcattttcaatgctaccactgcgtgaataccctgatattgaaacgccaatagtcagtgtaagcactgactataccggtgccagtgcagaaattatcgaaactaaaatcacccaagtactcgaaaatcgcatttcgggtattgagggcatcaaaagcattaactcatcaagccgtaatggtcgctctaacatcaccattgagtttaatatcagccgcgacattgatgccgcatctaacgatgtacgcgaacgtgtagcccgcgcgcttgatagcttaccagagcaggttcgcccgcctgaggtctctaaatcaaacagtgatgaaagcccaatcgcgtggttcgtactaaacagtaccaccatggattcattgcagttatctgattacgcacaacgctttattgttgatcgattagccgttgttgatggtgtctctaacgtgcgcgttggtggagagcgtaaatacgctatgaaaatctggctaaaccgtaaagcgatggctgcacgcggcattaccagtagcgatattgaaaatacattacgtacagaaaacgttgaattacccgccggtgaaattgaatctatcgaccgtgattttacagtacgtactgcgcgtagttataaagatcagcgagactttcgaaacttagtaattaaacgtggtgaagatggctatttggtgcgtttaggtgaagtagctgatgttcatttagaagctgctgacgacgaaagcctgttccgtggtaatggccgtaacatgattggtttgggtattgtaaaacaggccaaagcgaacacgcttaccgtggttgataacgcccgtgctgagctcgaaaaaattaagcgtaatttgccagaaggcaccactattcaagacagctacgactcatcaattttcatcaaagaatcaattgacgaagtatatagaacgcttgcgatttcaatggcgctggtagtgttagttatctacttatttttaggtaatattcgcgcaacgcttatccctgctgtgacagtacctgttgcgttagtgggtagctttatgttcttgcttgctatgggctactcaatcaacttattaactctgctagcactggtattggctatcggtttagtggtagatgacgcgattgttatgctagaaaatattcaccgccgcattgagttgggcgagccacctttattagctgcgttccgtggtgctcgtgaagttggttttgcgattattgccactaccctcgtcctcatctctgtgttcgtaccgctggtgtttatggatggccgtattggtgctttatttaccgagtttgcgatggctgttagtgctgctgtgttcttttctagtattacggcattaacactttctccggcactgtgttcaaaagtactcaaggcttctgaaaaagagagtaaatttagccagtggatggataaaaccttcgccaaaatcgaaaatgcttatcgtaactcacttacttctaatatgggccgtaagtggagcttactactaaccatgattttggccggtgttgccagctttatgctattccaaaaagtaccatcagagcttacgccaaaagaagaccgtggtactttctttatcatgatgagtgggcctgagggtgcaagttatgaaaataacgcagccaacatggcgaaaattgaagaacgtttaatgccttactctgagtctggtgaattaagccgagtgcttgttcgtgtgcctggctggggtggtcaaggtggtgttgctatcattggcatggctgactgggataagcgtaagcgctcaacttgggaagtgatggacgagataagcagtaaaatgaccgaagtaactgatgtgcgtgcgtttgcaattatgcgccgtggtattggcggcggtggctcatcacgtcctattgagtttgtactgcaaggtaacgattacgaccaactagccgattggcgagaccgcattattaaacgtgcagagaaaaaccctggtttggtaagaatcgaccatgattataaagaaacattcccgcagtttttaatcaacattgataaaaacaaagcagcggatttaggggtttcagtgtctgatgtaggccgcactctcgagaccatgttggggcagcgccgcgtaacaacctttattgaccgtggtgaagaatacgatgtgatacttaaaggtaccaaagaagactttgctaacccgaccgatatctcaaatatctacttaaaatcacgcagtggcgaattagtgccgctagatagcttaattagcttaaaagaagaagccaccgcttcacgtttaaatcgttacaaccgtatgcgcgcaattacgttaagtgcaaacttagccgatggttataccctagaagaagcgcttaatttcttaaatcaagttgccgctgaagaaaacgacatcgatggtgcaattgactataaaggtgagtcgcaactgttctatgaaggcgcatcagcaatgacctatgtgtttattcttgcgctcacagtaactttcttagttcttgctgcacagtttgaaagctttattcacccatttgtgattatgttgactgttccgcttggcttagtcggcgcattatttggcctttggtacacagatctcactctgaacatttacagccaaattggtatcgtaatgctgattggtttaagtgcgaaaaacggtatcttaatcgttgagtttgccaaccaactgcgtgataaaggcgttgaatttaacgaagcgattacccaagcggcaacgcagcgtttacgcccgattattatgacctcactgaccacaattatgagctcggtaccactggtacttgcaagtggcccgggtgcagagagccgtatggtaattggtgtggtggtatttacaggtgtaatagtggcaaccttactaactctatttgttgtgccagcagcatatactgccctagcccgtaatactcagtcgcctgagtatttacaaagcaagttagagcaacaagctaaagacaaaccgttggaagaaatttagagctgtctttaagcaacaataaaacgccgtctttacggcgttttgttttttcagctatagtcagcaaaacagtgagggaataaacgatggataacaacatacaaatagctacttttggcggtggctgcttttggtgtattgatgctgcatttagacgagtgaaaggcgtgcttaatgtcagctctggctatgcaggtggtgaaattgaaaacccaagttatcagcaaatatgtactggcttaacgggtcatgctgaggttgttcagctcgattttgacagcagtattgtgagctataatacccttcttgaaatgttctttactttacacgatgccacacaattaaatcgacaaggcaacgatgtaggcacacagtatcgtagtgttatttattatcatactgagcaacaaaaagctgaagcgcaaacgatgatagcagctttacagaagcaaattcgtgagccaattgtcactgaacttagcccaatatcgaacttttacccagcagagcaatatcaccaagactattacaatgaaaacccgaatcaaggttattgcagtatccttatcgcgcctaaacttgagaaattcggtcaatacttcgctgataaactaaaatgaaaaaagctcgctaagtaggtagcgagcttttagacgcagaactaataattttccttattattagaactgataacgggcacctacaaacaagcggcgctcggccgtgttgtagtaataaaactcgtcgttgataaagtcaccatctaagtcagtgccataggcatcaacggcgttatactctttatcgaataggttttctactcgtaaagacacagttaagttgtcagtcgcttggtagtgaccgactaaattccataacgtatacgaaggtaagtgagttagcttgccatcacggtcaccacggtattgcatatcaataccggcatcaaaatcaccccatgctttatgtaatgaccaattcacactgtggtttgacacataggttagtgactgaccggtttcggtatcttcagcagagaggtaagtgaagttaaagctgtgatcaaagccaaacacttggtttttaaagctaaactcaacaccttcatggcgagcttcgtttatattggttgggatccactgccctgatgcatttggtgcccaggcgattttgttgtcgatttcgctgcggaaaatcgcaatatcaaggctaatatcattcacattgagtgataggcctagctcttggttatctgatgtttcagggtttaactctggattacccgagcctggataatataggtcattaaaagttggagatttaaaaccagtactttgacttacacggaatgtggcgatgtcattgaagtgatagccaacagcggctgtgtaagtggtttcatcaccaaactgctggtcatcatcttggcgaacagttaggtttgcaagtacttgttcatcatcataataagcgccaatgaacgcagcgaatacttcacggctgtcttttaagtaagtacctgagttagtgtttacttcatctttataccaatttaaaccgccgcttagtgttaatgcttgattgaaaaagtattgaccattgtaatcaatttgctcacgctcagtttcaaacttatcgactactgtcgcgccagtgtaatcaatgcgtgaatcatctgaactatcagttgatatggcaatatcgatggcatggctgtatttgtcgaaagcttttttccagcctaatgatgcttggtaattttcgaactcacctttttctaccgtgctgtctgctgggctataggcactatcgtactgtgcttcgccttctgagtattgtgcttgcgctaaaaactcacctagttgctcattttgataacctagattaaagccaaggtttttgttctcgtagccgtcttcatctggcgctaaaccttgcagcacatcaaagccatctgttttttcatagccggcattaacagcaacatcaacgcccgcaaactgaccgcctgtcgccacttgatactcttgataagcatctgagccaaaagtgacatctaaagtcgtattttgtgctttacgcgtaatgatattgatcacacccgctagcgcatcagaaccatatactgcagcacgtgagccttttactacttcaacacgttcaatactgtttaaaggaatattgctaatacttttatagccaagtgttgctgatcctgtacgtacaccatcaattaaaataagcgtatgacgagagcttgcaccacgtaatgaaacacctgagctttgcccaaaaccaccattggcattaatttgaaagccagcttgagttgccagtaagcttggtaagtcacgaacataacttgcctcaatatcagcacggtcaataactgtaacactggctaatacatcattaattgattgttcgaatttattggcagtaactgtgatgtgctcgattgattgctcgtcagcagatacagaaaaagacaacgcagcagcaatcgctacgcctaacgcagatttatttagcatgatatcccctagcctgtgcccaccgcacacgcaaatagtaagttacttcaaggccggtctccggactctgcgtatgtatggcatacacattaccgttgcgggggcagtgttggcattgttttctccctgaaaacgcaccaacttcccgattatcttgcgactatttcaccctttgaaataacacgtatctttgtagatacagcaagcaccttgaaaataggctgctattgtgatgattttaggaaagaatgtcaatggacggctataccgctaaagacaagttttaagctgtaagccgtaagccgaaagtaaaaaagccaatcacacggtgattggcttttatcaaacaaataattaccagaaatactcatgaggttttgagtttcctaacggaaaaacaattccttctgggtcagcaccattcatcacacgcttgcaaagtgctttatttaagcgtcttcttggcttagtcatcgtcatttttacccaccaacttggtgtttgttgataaaaataagtactgtgtggacctgtgtattttctgtttattttaccgtatttattacggtcaattgttttgttttttactgacataaatatcctctagctgaaaatagctagaagatatctttttctctgtaacctaatattcgtctcatgatacgctccttgtaaagctcagaaacttactggcttacagcttaaagctataagttttaatcgcggaagtttttgaactggaatggttgacctaaatcagcagcacgaacaacttgcattgcttcttgtaaatcatcacgttttttaccagttacacgtaattcttcaccttgaatcgcggcttgtactttgatttttgagtctttaattaacttaacgattttcttcgctacgtctttttcgataccttgcttaagtgcaacgtcacgcattacgtatttgccgctacgcgactcgtctcttaattcaaggctagatacatccaaaccacgctttgaaatttttgctgcaagaatgtcaaaaagttgcatcacttgctgtggtgcttcagcttttaacttaattactttgtcacttagttcgattgatgcatcaacaccacgaaaatcaaaacgcgtctctagttcacgctttgcattatctactgcattctgcgcttcgttcatttctacttcagaaacaatatcaaatgaaggcatggggttctcctaacatagtcttttttaaattcgtttatggttggcaattataacgcttatttgtcgattctttctatttttatccgatttgttcaggtgcgatgcaaaaattgtttgatatactggccattcaatttcggcatttttaggggttattgtgacaaggcgtgtttaccaagttatctttttagccagcattattggctttacgattttatttgccaaagaaattaaaggggttggcaacctgtttcctcacgtcgataaagtagcgcactttggtatcttcttcatactcgctttggtgatggacaaggcatttaagttacctctaatggtacaaattttactgttagcaggctacggagccgccattgaatttatgcaagatatgctgccttatcgccaagcctcagttggtgactttatcgctgactttattggtgctgtaagctattttgctataaagcttggctttcatttaggtagtaagcaacgtaatggctaatttattagtagtgggtgatggcgcaataggcctgctatttagccattttttatctgcacaacatgacatcacattactgactcgtaagccaaccctgaccacgcgtttttatcaagcaagtaatggcaaatcacatcctattaaagcgcgccttattaattatgcagaattaaatcaatcgccgccctttgacttggtattaattactgttaaagcatttcaggtgcaagctgcttttaaacaaataaaaccttaccttactaaaaactgccaacttgttatttctcacaatggtatgggtaatgtcgatgaacttaatgcccaactgttagacactcaagggttatcgtttctaacaactcgtttagctggctttaaagcaacgccctatagtgtaaaccacacaggaaatggcgaaagtgtgcttggcgcatgtaatgcagcagcaactgaaaaactcaatgaacttgaccatctatttagcagcctgccacacttttcagtgagtgatgatattcactcattgcgctggcaaaaactgttagtcaatattgccattaacccattaacagcaatccataacgttaaaaatggccaactccgtgcaccgcaatttagcactcgcatcattaatttactgagtgaagcgtgtctggtagccaataaacaaggtgttgatgtaaagctttgcgaggcacttgatcaagcctactcggtgatgactgcaactgcagaaaacttttcttctatgcagcaagatataagccataaccgacaatcagaaatagatgcaatttgtggttatgtgtgtgaacaaggcgcgaagctaggtgtaaaaacaccgtataaccaagccatgctgagtatgataaaaataaaaagctagctactagaggaaagagtaaagttactagcttctgacaattatttcaggcattaaaaaagcgcgaacatgtcgcgcttttatcaccatcccttacgggcgatacacttttacgttgctgaagccttcttcgtgtaagatcagcgcttgaagctgactcatcacacctttagcacagtataagtaatattctttatcttttggtaagtcaccaaatttagtcgctaagcggaagaaaggtaaatgcacaacttcaataccttcaagctcaagtggatttgcgtcttcttcttcaggtgagcgaatatcaacaacaaccgctccctttggtaaatcagatacagactcggcttcttttacttcttgcttagcttcggtgtcgatatcgcggatatccatcacacgggcattttcaacaaccgtatttaacacgtcaaaatcaaatttagcttcttcggcaagaatcgttttaattttggctttaaccgttggctttttagaaatcacaccacagtattctggcatgctttctgccatttctgcggtaccaattttacgagcaatattaataatatcttgcttgtcgtgttggattaacgggcgaatgattaaagtttcagttacacggtcaatcacgcttagattagccagtgtttggcttgatacttggccaatactttcacctgttactaatgcttgcacacctaacttttctgcaacttggctacctgcacgcatcatcatacgcttaagcaccacacccatttgactgttttctacattttctaagatttcagctacaacaggttcaaaatctacagtgacaaactttaccttatgggtagagctaaactgtttccagatataataactggcttgtttaacaccgatttcgtgagctgccccacctaagttaaagaataagaagtgagttcgcgcgcctttgcggatcatctggtagcttgctacacctgagtcaaagccacccgacataagcgacagtacatcttcttgtgttggtaacgggaagcctgccatacctaagtgagtttcagtaacgatatacgctttatcatctcgcacttctaaacgaatggttacttcaggatgggatagttttacgcttgcacctgcaacatgctggtttaagccgccaccaacataacgctctacatcgctagaagtgaaatcgtgtttacccgaacgcttacaacgcacacagaatgttttaccttcgattgtgtggccaattagctcaagggctttttgataaatatcgtctaacgaatcaaagtctgtttctgtaacttcgataaattgcacaatacccggaatgcgttttaagccatcgatgatatctaggcgaacttgctcagaatctaaaaggctcacaaccgaaatattatcccagttgtttctaacttgtactttttcgtcaacacgacgtaagacgatcttaatgttattttctaataacttggtaaaacgcttacgaacagatttactcttgatagcgatttcagggtgtaatttgacgataaatttaagcatagttcactcttagactgtgggattcacacgccccgaggcataccaacctcaagggcgcgcgattataacaaaaattatagcgtctaggaaataaactgcttggctggggttattgttcaggatctgaggcttcgctgagcgctaaatattttgcccttagctgatttacctgtggtaaatgctgctctgtgcaatgcgcttttaacagcaatagcacttttaaaataccattgtagatatcttcccttgctaactcaccacttaagcgacgcgcctttatatacggggtccaaaagctaaccgtcatttttaacatgtgtgcaagctctgtgacatcatcatcttcaatacagatgataccgccagcacgaagtgctaataaaacttctttcacttgctctagcaacgccgcttgaaaatcaatgtaatctttttttaatacttcatcgcgagataaaatatcgcccaagttgtcataaaaaaattgataacgccacatcaattcaaacagcgaatcaaggtaacctgctaggttttcaagtgcatcatcatcaggagacaagggtttaaaatgcgtatgtaaatgttcactatacaaagcaaagatatgacggataatgtcttctttatttttaaaatggtaatacaagttaccagggctaatgcccatatgtgcagcaatatggttggttgtaatagcacgctcaccgtggcgattaaataactcgatgctggtgtgtatgattttatcctttgtactcatatgctgtttactctgttgttgtggttattgcattctattgccctgctaagccaagcagtataaacaaatgcgtgacaattaaatactaccttgaaaaataataacctcaatcggtgcagtaccttagatgggttttacaatctaataagatacgcgtattttctaagctgcagacaggctaaaacactgttaatatagcaggcaaatttctaaatcgctgatagttatgaacgttactgcaatatacccgggtacatttgacccacttacaaatggccatactgacttaattcaccgagcagcgaaaatgttcgatcatgtcatcgttgctattgcgcacaacccaagtaaacagccgtgttttacgcttgatgagcgcgttgaacttgctaataacatcttggcacacctagataatgtgagtgtaattggtttttctggactattagcagatttagctcgcgaccataaagctgaagtgctcattcgcggtattcgagctgtttctgactttgattacgagtttcaattagccaatatgaaccgtcgacttaaccctgatttagaaagtgtatttttaacacccgccgaaaaaaattcgtttatctcatcaaccttagtaaaagaagtagcaagacacaatggtgatgttagcgagtttgttgatcctattgttgctaaagctttacaggaaaaaattcgcggatgaagctaaaaaaaatacttaccctaggggccttttttatggtctcgacaccgactatagcaggcccttgggttgaaagtgatgatccgttattacgcgcctcaatcgagatgttatttaaccaaggtgtgattaaacagcctataaatagctaccctttgatgtggcaaggtattgctcgcgatcttagccttgtagatagcaatcaacttgatgaacagtctcaatttgcttatcaacatgtgaaacacgcgttaaatattgccaagcaaaaaacagattcaggtgttcgactaaactacaatggcagcactgatactcaacaagggtttggtaaacgccatcaacagcaaagcggtgttaatagctacggttcaataacgggtaaacgtgtaagtgcaaaagtgagtgttaattacgcagatgatgcactcgacgaacagcatgtaaactaccaagatagctatttagcggtgttggttggtaattggtcactcagtgccgagcaagtcagtcattggtggggaccaagtaacgataacgcgttactactatcaaataatgcagcccccatgaaaggtttgcgtttcacaagagcgaatactcaatatgtaggcccaagttggttatcatttattggtaattggcaactgactggtatttatgccaaacaaaagccatatttgaatacaagcaacaaaggtgattattgggcgttgaggtttgctagtacccctttaaatggtttagaagtggctgttaatacagctgggtctgactatttaacaactccagaattagctcctattaatcttgagaataacgagcaaacgcatcgtttaacaggaattgatgtaaaatactcaaccactttaatgtcggttcctattgccgtatatggtgaattaatgggccgcaacgaaagcggtttggcaccaagtgagccgttttacaccattggctttgaaagctactttggtacaactgatagcttgctaaaaacgtatctcgaatactcgaatactcagcaacaatgtaatattgccagtgactgtgtgtatggctcaggcagctatactcagcgctcgcgtttaattggcagctcaacaccagagcaaagtaaatcagcagtgcttggggcttattatcacaccctcaacggctatggcggacatgctaaactacgctggattgatagtgaaaatatcattaagagtagccaattgcagttagaagtaggctatcaacaagcattactcagcggtctttggaaagtaactggattaatttcaagagatgaattaaacgataacaacgaaaccaacacggccctcagaaccagctgggaataccgcttttaactaattgaggtcaagctagcctagcttgacctgttaagcccttatagagccgcaccagccccaaaaagtctttattagagaaaagtgcaatgagcatcatgatgtccatcaggttcaccgtgatactgtaaacaccccaaaaccaccagcttcctgtataggcgtaattaatatcgaaatacatgcctaaaaacagtgatatatttacgcttaaaccaattgaaatataaagctttacaggctcatcagaaatgcttttactttttgaaattaaccacacaataaaaaaaatgacaatatcagaacaagcccagattagataagctaatgttgtatccaagatatcgtatccaaaagtgatattcagcaacggatcactggccatatatgaaataaacatcgtgaatgagatccacatcttggtgccatcaccaccaggaaatgaagattttttgaccatattgtataaaaaggccattaaaaatccccacataataaatgtagctagatataaacctatgttttcctgaaccactccaatcattgattagattaattccaacttttcttcaggtttttcgctatacgacataaaatacttaacaaattttttgagtagtaaaaagtctttattggatgcaatagcaattatcatagttaaatctagtaaatttacacctatcgaaaatacactccacaagagccaaggttctcgattacctagtatgaaaatatcgtaatgcattgagagcataaaacatgcattaaggagtaatccagtggtgacataaattgaagctgtaaagaactttatgctctttagtaacaaccaaaaagagattactaatattgttattaaatcgtatagaaaccaattcaagtatgggccgtcagacaatttaataacatccgtagcgaaatatgataaggccataatcgcagataaaatcagaggagatttatcaactttattaatgctgatcgatagattgaacaagaaagccataagtaccccccactcaataaaaattccaaccagctggccagtaattgaatcaagatacattggaggtatttactacttttttattcctaaagtgagatttgatagattttttaagtttatgcagaccatatatgtctctatcgataatcagcactgcaatcatactgtaatcaacgaagttaactccgaatgcataaatatcccatagtagccatggagttgaatttctatttaactcgacatctatatataaagagataaaaagagtaatgttaacggctaaaccaacgactaaatataaaaaggaaggggtcgttttttttatgaaataatacccagttaagagcgcaaatactgttgctaagtcgtaaagtacccaatcaaaataagtagcggcagtggaagagatccaagtgaaaaaataatcaccagccatataagaaagcatcattataaaagagctgagcaacaaggtagtacgacgcttgacatctaaactataaacaaaaacgttaaagaaaaatgccattaaaaatccccaagcagatagggctgataatgaaaaaaatccaaattgctcagttaaaaacattgttttcctataatcattcttccttcttactaggaggaagaattacaccgccaccgcgttgaatctctgcaccacctgataaagacagtgcttcacttgataaagttactgtatcagattgcagggttttattactagtagtttgttccaaagctggcttagtttgttgcatttggctgtatgcttgcatttgcaattggctattatttgaaatttgcataagataattcctttaagttaattgttgttgcaccaaggtttacatgaaatatgtaacttgttaagcgttctcatttttttgacgcttttttgtgcattaatgtgatgttgccaccacactaatctaaaagcaattagcgatccaacttttcgttaacatatgatctttttgatcatcagcttattattagacataaaaaaacgcacaggggtaaccgtgcgttttttctatccagggaatttaagccacgcttttacacgggatcaccgctttagtacttggctttaaaatgaattccattgcaacttcatcgcaattatcttttcgtaagcaaagctcacagtcttttataactttctcgggcaagctgtctttgctacagtggctaaacccttgctttgcaaaaaattctggcacacgcgtaagtacaatgatcctgctaagcgccaattttttggcttttacaagtaagtgctcaacaagtagcttaccttgtcccgacacctttgcttgtggatcaacgcctaacgagcggatctcggcaagaccggtatcatagatatatagtgatgcgcagccagtaattttgttattacattgtgcaacagcaaactcgttgattgaatgaaccatatcacttttagctcgcggaaggttttcacctaccgcagcccaatattggataagctttgctatcgattcaacatcacctaagtttgcatcacgaaccgttatttgctgtttttttttgcctgcttaattgcactcgacacttgctctaatgaagtgccaccaagagctcggcgggctttaatacaagcatctatctctagtacaggataaacatctgactcaaaaatactatgcacagacttaaattcttctaaacttaaatcttctaagttattcccttgggcaatagccatttgcactaaggttcctacaatgtggtgaccctctctaaatggaattcccttagcaactaaatagtctgcaagctcggtcgcatttgagtgtccacctttagctgctgcaagcgttttatcagcttttactttgatacctttaatacatgcttgcgccatatgaatacaagcaagccaagttggcattgcatcaaacaagccttctttatcttcttgcatgtctttgttgtaggctagtggcaacgcttttaatgtcatcatcatggcgctaaatgcaccaaaaacacggcctgttttaccacggatcaattctaatgcatcagggttctttttctgtggcattaatgatgagccagaggttacgccatctgaaagctctataaagcccgcttcacctgaattataaaaaatcagatcttcagccatacgcgataagtggatcatcgaaattgatgcacagcttaatagctcaaccacaaagtcacggtcagatacagcgtcaagactattgcgtgttgccccggtaaaacctagcccctcggcaagaacctgcctgtcaattgggtacgcagtgcctgctaatgcaccactacctaatgggcagtaattcatacggtttttggcatcatttaaccggctttcatcacgctcaagcatttcaacataagccatacaccaatggctaaataacacaggttgagcacgctgcaagtgtgtgtagcccggtaaaatcgtaccgagttcacgctcagctaaggcaacaaactccgcttttaagtcactaattgctgttaagatgtgctctgcggtgtcacgacaccataagcggaagtctgtagcaacttggtcgttacgactacgaccggtgtgcagtttctttgctaaatcacctactttgtcaatcagtgctgactcaacatatgaatgaatatcttcatgacctgcaactgctacagcttgtggattagctttaacttcttctaacaaagtattcagtgctgcaacaagatcgtcatactcttgctgatttaaaacatcaacttgctttaaagcacctgcccatgcaactgagccaataatatcttgctctgcaagctgataatcgaaaggaagtgagtcgttaaattgtttaaacgcttcatctggacccgaagaaaaacgtccgccccataatgccattgaactgtctccaaattgggctatcgccccgcaaagcggggcgataataaaattactttttcgttagtgctgagattctgctagaaagcgagaataaacgaatgaagccttctgcatgtgattgatcataaacatcatcttcaccaaaggttgcaaaatcttcgctgtaaaggctgtttggagatttcttctgtaccgcagttacttggcctttataaagcttcagtactacttcacctgttgccaatttagccagagactccgcccccgctaaaattgagtcttttaacggtgtaaaccaacgaccgtcatacactaagtgtgaaaactcaccgccaagtacttctttccatttacggcttgatttatctagcactagttcgtcaacagcttgtaatgcagccatgatcacagtgcctcctggcgtttcataacaaccacgcgacttcatgcctactaaacggttttctacgatatcaacacgaccaacaccatgtggcgcagcaatgttatttaatttaactaagcagtcatacggttttagtgattcaccattcacagcaaccacttcgccttcaacaacatttaatgtcacatattcagcttcattaggagcttgttcaggagagttagtccaagtccatacttgatcacttggttggcaccatggatcttcaagctcaccaccttcgtgtgaaatatgccatgcgtttgcatcacggctataaatttttgtcgcagaggcagagcacggaatattacgctctgcaaggtaatcaagtaatgattcacggcttgataagtcccactcacgccaaggtgcaatcacctttaggtctggtgcaagggctgcgaaacatgattcaaaacgcacttggtcgttacctttacccgtacaaccatgcgaaagcgcatcggctcctactttacgggcaatttcaacttgtgctttagcaataatcggacgagccatagacgtacctagcaagtacgtaccttcgtaaatagcgccagtttttaatgttgggtaaatataatcacttaccatttcatcttttaaatcaactatatgacactcagacgcacctgaagcaatcgcttttgcttcaacgccttctagttcttcagcgccttgacctacatcagcaacaaaggcaattacttcacagccatagttttcttttaaccaaggcacgattgccgatgtatctagaccaccagaataggctaatacgacttttttaattgaactcattggtgttccttaaacaaaatttggatttagtaatgtcacaagaagagcgttctgcgcatgcatacggttctctgcttgttgaataatttttgatgccgggccatccattacctcagaggtaatttcaaactctcgatgagccggctgacagtgcagcacagtttgtgcgccagtcttctcaagcaatgcctgatttagctgatacggcatatacttagctttaacttgctcaagcggtgttttatcacccatcgaaacccacgtatcagcatagactgcatttgcaccaactgccgcttcaattcggtcactgaccattacagaggcgccattcatcgctgcaatttgctcagcttgcttaagaatttgcgaatcaggtgagctacctttagggcaaactgccacaaaatcagtgcctaaagtggctgctaatagcatcagtgagtgagttacattattcccctcacctaagtaagctagcttaagtttactaacatcgccatgtacttcttgaagtgtcaagaaatcagccaaagcttggcatgggtgatataagtcgcacaagctattaacaacaggtacgcttgaaaactcacccaaagtggtaagtgttttgtgttcgaatacacgagcaacaataccatctgcccacgttgagatattaagtgcaaagtctttaactgattcacgtgcgcccatggcaccattttgtgaatcaagatagaccgcatgaccacctagcttattaataccaatatcaaatgataaacgggtacgtaaactaggtttttcaaataaagtaaccactgatttacctgcaagcgcttggctaaaatctgcaggatttgctttaattttttgcgctaggttaagaagtttaagtgcgcctttttggtctaactctagacccgataaaaaatgatttaacatgaaatacctatggtgtaattttcgttcctacgtgctcgccttgtaataaagcgactaagttttctggctttagccagcttgagatatacacaccacgtcgtaaatgttgggcagcaagaaggctggtctttactttgacctccatcccgccctgaataactccttcaaggataagtgtatcgatttgctgcgtatttaattgatgtaatggctgcttatttgcgtcaagtacagcttctacatcagtcataaaaataagctctgcattgagctctttcgctatggctgcggctgcttcatcggcatttacgttataccactgaccgtcctctccaaagcctattgaactaacaaggggtaagcgaccttgttctaataagctcggtaacacgctatgacagcttccactacattgaccaacttggcctaatactttgagtttttctgaaactacaacgcccgcctcataaaggctcaaaccaacaggcttatggcccgcaccgatagcttgactcataagctgtttgttagcacaacctgcaagcgccccgacaatataaggcatttgttcattaggactgatgcgtaatccttggtgctttgcagttacaaaacccgcctcttttaaccatgcatctacaagcgctccaccgccatgcacaatcacaaaattagcgtgttcttgcgatgctagaacatcgaacaatgcttttgctgcatcggcagtgtttaatactgcaccaccaattttaataacccatgttttcatcatagtgctccgctaaggccagtatgatgaggttcacccatcgctaaattaatacattgcaacgcttggcctgcagcaccttttaataggttatcaatcgcagacattacaattaactgctgacctttttgttgccatgcaatatctacataaggttgtttagcgacacctttgatgcttggaattttattgccaagtaagcgaattaacggctcgtttgctaaaacttgatatgcctctttaacctgttcaggagtgacatctggctttagctgcacataaatggtttctaggatgccgcgtggaaaattacctaaatgcggggtgaataacactggatgtccaagatgctgctcaatctccggcgtatgtctgtgattaaataaaccataaggggcaagtgatacttcgcaaaaatgcgtattaacactggcttttctaccagcgcctgtcacacctgacacagcattaacaataacaggctgctcagccagtaagttcgcttgtttaaggggctttaatgcgttaagcgctgctgtcggataacaacccgctacagcaacaaggtttgctttactgatcgcatcactattccattcagctaaaccatatgcagcttgtgctaaaagctcagggtgttcatgtgcgaaaccgtaataagtttggtaatcctcattcccagctaaacggaagccacctgaaaggtcgaatacttttttacccatagctaaaaattgtggcgcaaggtcgacacttactttgtgatcagtacacaagcacacataatcagcattattttcaatatctttgtaagcagctgttgttagtgcttgtaaaggatactctaacagccctaaatgctcaggatataaatcacttaataatttacctttatctaaactgccctctgagacataacatgcttgtagggttaatttagggtgcttagcaactaaacttgctagctctgcgccgctgtaaccacttgcgccaataatcactacattcattgcttacttttacctattaaatctatttatcgatacgcctaaaacttctcgctgaaaagcgaataaaaacactgtctaaagtaatgaaatcaggttatcgtcgttttgtgttcatagtacagttacactaatatttatgcttaaaaagtgaattgatattcatcataaatacttttatattgttatgcaattagattgaataattatttttggattttttatgtctttaccgtcttttttatctatgtaccagcaattgattgcagcgccttcaatcagtgcaattgaagattcactatgtatgagtaataaagaggtgatctccttgcttgcctcttggtgtgaaagcctcggttttacttgcgaaataacagaactggagcaaggtaaaggccgttataatttattggcaaaacgcggtgaaggtgacggtggattaatgttggcaggtcataccgatacagtgccatttgatgatagccgctggaattatgatcccttcaaactcagcgagcataacaataaattatatggcttaggcagtattgatatgaaaggcttttttgcctttgttttacaagcgattagtgagcttgatgcaacaaagcaaacagagcctttattaatcttagcaaccgccgatgaagaaaccacaatggcgggtgcgcaacaaatatgccgccaccctaacttgaaaccagcgcgctgtattattggtgaaccaaccgatatgactcctgttttcactcataaaggacatatgagtacagccattcgggtaattggtcgctcaggtcatagctctgatcctgaacgtggtttaaacgccatcgaagtgatgcataaaatgattacaaaattgttaatcattaaagaagaattaaagaataaatattcagttgatcactttgaaattccgtaccctactttgaaccttggtcatattcatggtggcgataacgccaaccgtatttgtggctgctgtgaaatgcacatcgatatgcgaccactgcccggtttgagcgtgcaagaactgcaggcgattttgctaagtgctgctgaagaaataaatacccaatacccaaatgcagtgagtgttatcgacatgcatgaacctatccctgcatttagtggcagcacagatactgcgcttgtaaaactagctgaaaaaatctcaggacaacctgctgttgctgtaaactactgcactgaagctccctttattcaacaactaggttgcgaaacgattgtgatggggccaggttcaattaatcaagcccaccagcctgatgagtttttggcgatggaaaaaataaaaccttcgcaagcgattatcagtaacatgattaaagcaagctgctttagtgaataacgggagcatcacgctcccttttttaatccatgtacttacttaagtactttttaaataccggatcggttttcgccagctctttttgctccgccaaaatatctttaaggatggctttagaagtgagcggatttgctaatacaactcgaaataccacagttggttgatggtcatattttgcaggtgtcaaacgagtacgcgatacaaaagaacgaccggcttcacgctgacgcttttgcatacttgcagtaaagcgatttaatgacgcatagatgtcgagcttggtctcttcgtcggcgtcttttattttggcctgaatttctttaggcacatagcggtacgttaataaacaaagctcaggctcagaaataagctcaaagtcttcatcctctttaatcatctgcgcaaaggtacgcgcctttactatgccgcggtcaatcaacatttcatagcctttacggccaataacacgtaagcaagcatgcactaacatcgccatacctgggcgacttccctcaagtgtatgactgcctaaatctttcgagcctttacgaagaatatactcggcatgatgttcaatcgcatctgtagcagcagggtctttaaataacactaagcctgcccccataggcacatacatttgcttatgcgcatcgatagtgatcgaatcagcacgctctataccgcttagtaggtggcgataattcgttgacagtaaagtggctcccccccatgcagcatcgacatgaaaatgacagcctagttcagcacttaaatcagccatttcatttagtgggtctatactgccggtttctgtagtgccagcaacccctactaatgccatcactttaatacctgacgcttcgagttcataagccttcttacgcatggcattaacgtcaactttattattcttatcagtttcgatggcaataatgttatcgcgaccaatacctaataagtcgaccgttttccccaaagagtaatgaccccgctcagaaacaagcacagccaaccctttatagccatagtgcaacataccggcgattaaaccttgtgctgcaattcccttgtaatcaccatcggcttttaatagccgattgcgggcaatccataatgcggtgatattggctactgtgccacctgaacaaaacgccccaagagaggttttagcgctatgcatccacttgctgtaaaaagcatcgtcttcactataggctagatggtgcatcatgcctaacacttgtctttcaaggggtgtaaacgcttttgatgtttcaattttaactaggttctggttcaagcccaccatcagttttgataatggcaaaacgaagtgcggcaatgccgaggtcatatgaccaatgaagcttggtgctgcagtatgaacagaatgcgcaactaactgctccataatgtcttgtgcatagtcagagacgaaagttggctcttcagggatagtggccgactgaaaatctttttcaatctcgtgcaagggcttctcaatcgccgctatgttctcatttaagaacccagcaagattgcttgaaatttctgattcgattttactcaaggttgagtcaggtgcctctggcaccgtaaatatacgaatcaagctttcttttgaggcgacggcacaacgcttttgatccatcctaatacccattctaagcagctaaaaatgaattagatgttgaaacatcaccgttttcacttttgcggcactgttgctacgaaattggctaactttactggaatatcacgaaaatgtctcgtctaaagcaaaaaagccacgtcttcgatgacaaaaaagtgatctaaaaatgacatttgcggtaattttatactatcgattaagtcttttttcagtataatcaagtaataacagctaagggagcacttatgcccaaaggaatgcaaaaaaccagctggctactttatggctttgccgctttttttgttagcttatttggttacatttactatacctatgaaaccactcgcaatgaaataatcacgcatgttgataacaaattatttaatgctgctgtgagtgtaaaacatatcttaggtgatgattaccatgatcgagttaatgctggtttagctatctctcctgctgtatacaaagaaaaaagtcgcgcactctctgagtatgcaaaacaaatgcaacttgcctatgtctatgccatggttaagcgtgatgataccgtctacttcagtgcttcaagctatactcaaaaagatcaaaatacaggcaaagttaccgagttttttgacatctaccctgaagcaacagaattaaataaagaagcctttaattcaacagaacctgtttatgaaatttcacaagatcaatggggctactttaaaagtattttcgtaacctttgtcgataacaacggccagacctacatcaccggtgcagacataacacttagcgattttaatcagcaactgcaatacagtgttactcgcgcagcaattacagcctgtttctttttctttatagcagtattaattgcaggcctctattttttacaactcaaacgctcactatcaacagatgctcgcacaggctttgccaaccatgtagcgctagagtattacttaaaaaagacaaccaagtatcgcatggagctcgcggttatcgtcattaatgaattagacgatatcagtagtttttacggtaccgaagtcagcgataaagttatggcaagtttacttggctacttccaagcacgtttgccgaatgactgctttgcctatcgccttgccacgaataagatagctttgttgcaaacgcgcagctctgacaaagaattagaagaaataattaacaccttcaacaatgcgatcccggtgttaaaagaaccgttcatttacgttagcttgtatgcaggcattgcatctggcaacaagcttatgcttatcgaaaatgcccacatagccttacagcaagcaaagtttaataatcagcgagttgttcgctatgagaatgtttttaaacaagtcgaagagcgctttagaaataatgtaacgcttgccaaagaggtgaaagaagcatttgataacaatcgcattgtgccttactttcaagctatttatgataccaacactgagcagattgagcactaccaatgtctagcgagattagccagtgcccaaggccgtattcatagtcctgactactttatgacggtgctcaaacgctcacgtatggatgggctgttaagacgtaccatgtttacccgttgtgttgagcattttagaaaaaccaacctaagctggagcattaacatcaccgcgcaagatattcttgatccaagcttaagtgagtttttcgaacagcaactaagacgctacccacagcctcataacattatttttcaatttcatgaaagcgatgctattgcttattttagtgaggtaaaaacctttattagccttttaaaaaacaagggagcgcaggtgtttattaatgagtttggctcaggcttttcaaacttaccgcatattctaaaattagagatcgatggtttaaaactcgataaaaaccttgtgagtcaaattcacagtaataatgataactttttgtttattgagaatttagtaaagtacgctaatcagctaaacctgcaagttatcgctgagcaagtcgataacgaacaaattgctgacgcgctgtctcgtgcggggattaatttaatgcaggggagccacttttcatcgccagctccctacattcattaaaggttgatcactaaacggtggctttgctgaccgctagcccagtatttacgttcaaatggcgtgattgctatatcgctctcatataattgaacatcacaaggatgtcctgcaagctcgagcgagcgggcaaattccttcacgtaaatatcccaattgcttctgagctctaaacgaccgcctaatttaatgataaacggaaaaatagcagcgccatgccagcgcctttgcaagtgctttgctttcggccatggatttgggtatagcaaataatgatgcgtcggttgccaattagcagctaccgctaaacgccaaaagtcgtttaagtctgcttgcactaaaatatactggcccgcatcggtttgcttgtactctatctcatgcttctctaagcgatgagatgacttatcgataccaatcaccaacgcatcagggtgacgcttagctaagttagccgtactttcacctacaccacaacacgaatcaaggattataggcccgttaaacgcttgaaccttttcatttacctcatcaaaagccgcttgcgtatgttgtgcaatcggcttcttaaaatccgcacttaagtgctttaaaactatttcgtctaacttttcatgtaagccaggctgattcgatacaatacttctcgaatttgcatccgtcattagtgtctaagccccacaccacgtttaataagcgttaacgctaaagtaaataaacccacaataaataaaccaagtacaccaaatgctaccgataaatcgacatcagacacacctaaaaagccaaatctaaatgcattcaccatataaataattgggtttacttgcgatacaccttgccaaaattctggcaacaagctgattgagtaaaacactccaccgagataagttagtggagtaagaatgaaggttggaataatactaatatcatcaaagctatttgcataaattgcgttaataaggccacctaaagcaaataccgctgaggttaaaataaccgtcgccatgatcacaaaaatattatgaatttgtatatcaacaaacagcaatgatacacaggtaacaattaagccaactagcataccgcgggtcataccaccgcccatgtagccaagtacgataatgtaatttggcactggtgcaactaatagctcttcaatactcttttggaacttggtcgaataaaagcttgaagctacattcgagtaagagttagtgatcaccgacatcataatcagacccggtacaataaactccatgtaagtaaagccacccatatcaccgatacgcgaaccaatcaggttaccaaaaataacaaaataaaggctcatcgtgattgctggcggaactaaggtttgcacccaaatacgtaaaaagcgaatacactctttgatccaaatactttttagcgctactccatatttaaacattattcgcctcgcccttgttctaataagcctacaaaaagttcttctaaacgatttgctttatttcgcatactgagcacggtattaccttgttcggtcaacgcgctgaatacttggtttaagccctgagacttcgccacttcaacttctaaagtgtggtcatcagttagtgtgtattggtaaccttcaatgctaattggctgcactggctgctttaaatcaagtacaaaggtctctttatcaagtttggcaagtagcgctttgatagtggtgttttcaacaatcacgccactgtcgataatcgcgatgtttttacataacagctcagcttcttctaggtagtgagtagtcaagatgatggtcacaccttgcttattaatctcgcgaagaaagtcccacatcgagcggcgtagctcaatatcaacaccggctgttggctcatctaaaataagtaatttaggttcatgcatcagtgcacgagcaatcattaaacggcgcttcataccacctgacagcgtacgcgcttgcttatcttttttctcaaataaacctagttgctttagatacttttcagcacgctcatgcgccagctttcttggtacaccataatagcccgcttggttaaccaaaatttggttaagtgtttcaaattgactaaaattaaactcttgcggcactaaacctagttcagacttagcggcttctaaatctgtatcaatgtcatgcccaaacacctggacacggccagcgcttttgttcactaacgatgagataaccccaatggtagttgatttaccggcaccgttcggaccaagtaaagcaaagaaatcgccctgttgaacttgtaagtcgatgccctttacggcttcaacaccatttttataaaccttttttaggccttcaatatttaatgcgatcgttttttcgctcactgtttgccctctccataaccccaacgcttggtcagagtatgttcaatgtttaaatgatctaaaattcgcgccaccataaaatcaaccaagtctgaaatctgctctggctgatgataaaaacccggtgccgcaggcataatcgttacgcctagccttgctagtttcagcatgttttcaagatgaatttcgctaaatggcgtttcacgcgggactaaaatcaactgccctcgttcttttataaccacgtcagcggcgcgttcaagtaagttatctgacgcacctaccgcaattgcagacactgaacctgcactacacggacaaaccaccatttttttcggtgcagcagagcccgacgcaacaggactaaaccagttgtctttaccaaacacctttagttgttcaggcgcagcattaaaaagcgtgcttaactgttctgtcgctttatcttcgttacccgatagcttgatatttgattctgtatcaaaaaccactcgagcagcacttgagatcaacacataaacttgaaactgctgctgaagtaacacttctaataaccgtaaaccgtatggcgcaccagaggcaccgctaaaagctaaggttattttatctttaaattgcatattttgacgctccatataccggttagttgtgttcaagagcggtaattaagcgctgatgaatcccctcaaagccaccattactcataattaaaacatgctgcttaggcgctttacctgcaaccacgtgtttaataatttcttcagtgctagagctacaatgcatacctgccgcagcggcgtattctttgagtgaccagcttaaattgtctggttcaaataaatacacctcatcggcagcttcaagtgagtcaatcaaggtttgctgatgcacgcccattttcatggtatttgaacgaggctctaaaattgcaataatcttctcatcgcccacttttgcacgaagccctgccaaagttgttttaattgccgttgggtgatgggcaaaatcgtcatacaccttaatcgagttaatatcggctttaagctccatacggcgcttaggagaaataaactcagccaaccccgcaatactgactggtacggcaatcccgacatggcgcgctgctgcaatagccatgatagcatttttcacattatgctcgcccattgcttgccagctaacaatgccttgaacttctccctcaagtagcacttcaaattcgctaccatcagctttcagtaaacggtaatcccaatcacctgccagcgtttcgctttcactccaaaggccacgctcaatcacatcttgtaaggcttcatcttggcttggccaaataaccttaccgctacagggtaatgtacgcatcaagtgatgaaattgtttctttattgcgtttaaatcttcaaaaatatcagcgtgatcaaattcaaggttattaagaattaaggtacgtggtaagtaatgaacaaatttactacgtttatcaaaaaatgccgtgtcgtactcatcggcttcgataacaaaaaatggcgtttcaccaacccgtgctgacacgccaaaattttgtactatcccaccaattaaaaagccaggcttcattcctgcatactctaataaccaggctaacatgctcgctgttgttgttttgccgtgtgtaccagcgacagctaacacccacgaattttgcaacagattatgctttaaccattcaggacctgaagtataaggtaagcctttatcaagcacatattcaacacaagggttgccccggctcatagcgttaccaattactaccatatctggcgcaggctctagttgagcaacgtcataaccttgggtgagcgtaatacctagctcttctaattgcgtgctcatcggtgggtacacattttgatcagagcctgtcactgtatgacctaacgatttagcgattgcggcaataccacccataaaggtgccacaaattccaagaatatgaatatgcatctactgtcctgagcaaaatgaatgagagataaactaaggcgttataatgccaaatataagctttacttaccatgactagcggtcaatagagtattgccaaatagccatcataaaaaacacctcaaatttgaggtgtttttcgaattaagttgaatggttatttacagcattaagaatgcaaacaaaccaacaccaagtaacaagcggtagataacaaatggcatcatacccatgcgctcaataacttttaagaaaaagaaaatacacgcataagctgatacaaatgataagcctgcgccgagtaaaatcgcatgccaatcaatcgcctcgcccgctgttgcaagctgatacacataataggaacccgctgctgcaatgaccggaattgacattaaaaatgaaaaacgcgcagcactttgcttgttaaggcccagcattaaacctacggtgatggtaatacctgaacgcgatgtcccagggaataccatagccagcacttgtgaaaagcctaacaatagcgcactgaaaaaattgatttggtaaatgttcttaacttgctttgcttttacatcggcataccaaagtaacaaaccaaacacgatggtagaggtggcaataacccacgcatttcgcgagtaactttcaacgaaatctttaaacaaataaccaattaataatgcaggaatggttgcgacaataatccaccagcctaagcggctgtcatcggtggcaccttgagagccaaacgatttaaaccacgctcctagaatgtctaccacttctttacggaaatacaataccacggcacctaaagtaccgacatgaacggccacatcaaatgctaaaccttgatcgtgccaacctaaaacttgcgaaggtaaaattaaatgtgctgagctcgaaataggtaaaaactcagtcaatccttgaattaaggctaaaacaattatctcaataatactcatgggtaagaaaactccaccttccatagtttttgttgcggattattataattatcccatagctctgctagcgtgcattttgctacagggtgaaaaaaatcaggggctatttcagctaaaggctgaagaacaaatgcatttttggtaatttcatcgcgaggtaactgtgcaggcgaatcacaaattacgtcatcataaaataaaagatctaggtcaagcgttcgtggactaaactttttgtcatcacgggtacggccattttcaagctcaatttctttcaataacttacacagttcaggtagtggcatatcggtttgcgcccctaatactgagttataaaagttactgcctgcaaaaccgaccgcttcactctcaaaaactgatgagtgaataaaatcaggaaaatgtacttttagagcatcaagcgcctggcgaatataatgctctttattaacgttagagcctaaactaataaaaatttgcgccatgttaatatgccttgcgacgggtgatttcgactcccaccgttttggcttgtggcactgctgcaggtttactcacgcgaatggtcacttgctcagttgcaaactcagttaagataatggccgctaattgttcaactaaggtttcaagcagctctactggttttgctgttgtatgagcgataacccgctcgctgacttttgcataatcaagtgcaaggttaatatcatcagtcgcagctgccgcagaaatatcacatagcatttcaatatcaaaatacaggctttgtttactttctttttcaaaatcatacacaccgataatggtgtctacatgcaattgtgatatatataccttgtccattgatactccaagtgacataaatattaaaacacctctcatactaaacgcttattgatttgaataatccgcgctataagttgtcatactgttttaatatataaaaattacccctacaataacgggtagatgcgatgcattattgctcacatgttctactcaaaaatagtggcagatggttttgccgccaatgatagcccaaaagtgcagatttaaaaataaggaagcgcgtgttaacagccctaatgttagttttagcctatttactgggatcggtctcatccgcaatccttgtctctcggctgtttaaactaccggacccacgcagtcacggatcgaacaacccaggtgcaacgaatgtctaccgcttaggtggaaaagtccctgctgtacttgttcttgtctttgatattttaaaaggaaccattccggtttggggtgcttacttcttaaaaatagagccacttatgctcggcttgattggtgtagcagcctgtttaggccatatgtacccgctgtttttcagttttaaaggtggtaaggctgtcgcgaccgcttttggcacgttattacccattggtttatcgttaggtgggatgttaattgcaacttggatcttaattattgctatcacgcgctactcatctcttgcagcgttagtcacggtttcgttagcacctctttatacttggtggataaaacctttgtatacgttgcctgtgacctttttaaccgtgttgataattttccgtcatagagcaaatatcactcgcttactcgccggtgaagagccaaaagtaggggctaagaaaaaagcccctgaacatgaagaaggttgatgttaaatagcctctaacgagtctattggccagcgcggctttgttttcatatcaaggctagcaaactgccctgcttttaagcgctgcataccagcgtaagcgatcatcgcaccgttatctgtacaaaactctgtgcgcgggtaatacacacgccctttcatgccttgcattactcgctcaagttgcgcacgcaattgcacgtttgcactcacgcccccagcaatcactaagcgcttgataccggtttgctttaatgcacgtttacacttgataattaaggtatcaataaccgctgtttggaatgcatgagcaatatccgctttagtttgttcatcatcattgctatcacgaatagcgagtgacgcagctgtttttaaaccactgaaactaaaatctaagccgggtttgtcagtcataggacgcgggaatacaaagcgctcaggtgtaccttgctcagcaagttttgccaagcgcgggcctcctgggtaatcaagcccaagtaatttcgccgttttatcgaatgcctcacctgcggcgtcatcaactgactcacctaatacttcgtattcaccaatacctgatactttaaccatcatagtatggccgccagatactaataacgcgataaacggaaattcaggtttgtcttcttcaagcattggcgcaagtaaatgaccttccatatgatgaaccgctactgctggtatattccaaccataggctaaagagcgaccaatagaagtacccacaaggagtgcgccaaccaatccagggcccgcagtataagcaatgccatctaaatcttctgggccacagcccgcttgtgcaaaggcggcatcaattaaagggagtgtttttcgaacgtggtcacgtgaagcaagttcaggtaccacaccgccgtaatcagcatgtacttttacttggctatacagttgatgtgctaataagccttgttcatcatcgtaaatggcaatacctgtttcatcacatgatgattcaatacctaaaattcgcatcaattactccgccaagaaaaaataaacgcgtattttacagtgaaaatacgcattactgaatattaaattgcaataccaatgttggtttgaccgtctgataccgcaagctgtttgagttcttttacgttttcagagctaattcggcccatttgctctacaaaatcaattaactcagccagtacttcaatttcatattgcattaatgggtgttcacgaactgctttattgtcagctacttcaccatcaacggtaagttgatattcaatgtaacgcgccaccgatgcctgtgaaattttactaatgttcaaaaactcttggtcatcttttgccattaaaccgtgtaacatgcctagtaaagctgttgctgtatcaatagcagggtaagtgccaaacatatcaaaatcagttagttcaggcacattaggctctattttttcgatttgtttttcgaggctaattttactttttggcagtaaaatcttctcccaacaaacattcaaagcactacgaaaaaccgcagcatcaccaaaccctgtggcttcacagaataaactgtaattaggcagcatgcgttctaacaaagcaccacctaatactgctttttgtaaatagtttaattctctaatgcgttgaaaattattcgctttcgtcatttttaacagtcccgcaagaccaacaaagttcaaatgttgatccgttaagctcttgacactttgggcacacccaatcaggagccgattgttttacttgctgatagtttaacaatatttcttgcgcctggcgctcttttaatgcgtaaacaagcatatcaactcccgtctgttcaaagggtatctctcccaatgccccttgtaagagctcaccttgtaactgacactcaatacctttactgtttaacagccctttaataatattcgcttcaagactgttttcagcctgaaatactcgtacccatttgaacggttctgagctagcggtttgatttaatttcttattttgcaaattacttctcttttacttttctaaatataaaacctaaactacaaaagctttaccgcaatgcttatttcaaggtaactacatgacattaacgacaccaggactactatttcctgcgatttctttacttttactcgcttacaccaatcgttttttggtgctcgcccaacttattcgtgaactgaatgcgcgcgaaggggaaagtattcgccctcttgttgtcgcacaaattaccaacttaagaaagcgcattaagttaataagagtgatgcaagtatacggcgttgcctcatttttaatgtgcaccttatcaatgttcgctttatttatagaatttaataccacaggcatcatcttatttgggattagcctagcttgcttagcgatgtcacttttaacctctttgtatgagatccacatttcatgcgatgccatcgaaatcgaattaaaaaatatcgaaaaaaaaccagtagctgataaggcagagtaaatttctgcctctatacttattgttacgagatgcaacaataagtggtgtgtttgtggaagattttttattttctgatgagcagctagaagaaaataacgttcctattgatgaatcagaatgttggcatattcttgttgttgacgatgaagaagatattcaccaagttacgaaattagtgctagctggcttcactttcgaaaataaaggtctgcgcttttatgacgcctattcagcagccgaagcaaaagagttattaaagcaaaatattcctttttcagtcgcacttgtcgatgttgtcatggaaacaaaccatgcagggcttgagcttatccaatacattcgcgatgaaatagaaaaccatgatattcgcttaattctgcgtacaggtcagcctggagaggcacctgaagagtcgattatccgtgattatgatataaacgattacaagaataaaaccgaactaacggctataaaaattaagacgcttctttattctgcactcagagggcatcgcgatatacaaattattgatcgccataaaagtggcctagagcaaattattaatgcgtctgcgaatttcttaaaatgcgatagtgttaacgaatttgcatccactattttgagtcacgtcacgaatgtaatggggattaatgacgcacaaatctattgcgctgcagcagttaattttcagtcctcgccggcgaaagattttcaactattagccgcgtcgggagttggaccaacgccgaatcaaaatactattccagatgaggtgaaaagtttatttattgacgcccatgagcgtaaatcatcattaaaaacgagcaccgactatattggttactttccgacaaaagcaggccttgagaccatgttatatgttcataaaggaagtaaactgcaaacaaccgatcatcaactattagagttttacgcgaacaatattgccctagcctacgacaaccttaagcttagagaaatggttaaagaatcacaaaaagagttgtcttacattttaggtgaagccgttgaaaaacgctctaaagaaacaggctcccatgttaagcgcgttgctttatatagtgaattacttgcaaaactatcacaactcagtccatttcaatgtgaaattatcaagctcgcttcaccactacatgacattggtaaaattagtattcctgatagcatcttaaataagccaggtaaattaactgatgaagaatggaaaataatgcaaactcatgcagaagtgggttacgaaattttaaaaaattcaagtaacgaaattctgacttgcggcgctttgatttcatatcagcatcacgaaaaatgggatggttcaggttatccgcaaggtttaattggcaatgaaatcaacattgttggtcgcataaccgcccttgccgatgtgtttgatgcgctatgtagcgaccgttgctacaagcttgcttggcccttagatgaagcactgtcattgataaaagagcaacgttcgaaacattttgatccaaatcttgttgacttgttacttgaaaatttaccacttttccttgagattaaagatcgttaccctgactagatgtaacttttctgtaaaacgaacttcccaaaacaggtactataatttactatgccactgtagattataattatattgcctggatgtagggcttacttataacaagggactatataaagtgagatttgaacaacttgaacagtttgtagcattaggcgtattaaggcattttcgccaagctgctgaaaaaacacaaataagcacttcagcgttaacccggagtattcaaactcttgaagacgaaattggttatgagctggtaactcgctcaacccgctccgttaagttaaccaaagaaggtgaaattttcttagaatatgcgcaacaaaccctcgacaatctagaagaaacaaaacaacatcttttcgaatcactaaatggctgcgcaagcgaaaagcttgttattggttacactaataaagccagtgctgttgttcctgtatcttgcgggcaatttttagcgcagtatccacatgtaaaaatcgagatgcaactacaagagcaaagcgagctaatgcgtaagctacagcttggtgaaattgatattagtgtttgttcgcaagcaatgaatagtataggaagcgatatccatttacctgaccaactgattttatttgttgctaaagatcatccattagcgaataagagtgatatcagcaaacgcgattttgccgactaccctatgtacagctgcttttcacaatcgaaacaagtacaacagatgctaaacgacgccattgattcattcgataagtcagccagtgttaaagtaggtagtattgaacaagttatggaaggactaaaacgatcgaaccatattgcaatagctagtattgaacacgcaaacaatgttgcttctgatccggccttgcagcttttaaaaaccaacaaaggtgttgctcaagagcagcttgttatacaaacaaatcaaaaaatcaacgacaactctcatgtaagtcacttgcttgatcttattgaaaaaatggccttagcaagccagcactagtcgtctcttatatctgctagcctgaattaaacaggctagctctcccgtcttttactgatcacttatttattgcataaaaagcgtgcatcgcattatttttcagatacacttacgcaccttttttttattgtgtatataaatgaacgctcagctgatttctgacacttatttagatgcaattgaacaagctggttatgctattgttgaaaacgcgattgatgaaacattaatcaatgatttaatcgccgactgctatcgtataaatccgcattttcacacagcgggtattggtcgtttaaacgaccaacaaattgataaaaatgtccgtaaagataagaccttttggtttgatagttcaagccaagcacaaattacttatctggcgaccatggaagcaataaaaacgcagttaaatcgtagtttttatttagggttatttgactacgaatgccattatgcaaagtatcaacaaggtgacttttataaaaagcactatgatgccttcaaaggccgttcgaaccgtattttcacaacagtttgttacttaaatacgccagaatctggcggtgagttggtgatttacaagccgaaaagtaaagatatcgagattgtcgtaaaacctcaagctggcatgctggtaatgtttgaaagcgaacgctttatgcatgaggtattacccgcaaatgatgttcgctactctattgcgggttggttcagaaaaaatgcctcgatcagcggcattatcgacccacctagataattaaaatggcagtggcaaggatgctgctaaaccgataaaaatcactaaccccacatagtgattattcaaaaatgctttgaagcaaggatctcgctctcgtttatgaataagcatttgttgataaagtaaaaacccaaccgctgccactaaacccaaccaataaggcaaaccaagatggttactcatgccgatgaaaacaagaatcgcgataaataaggcattgagtaaaaagatgatgtgtctgtcatagctggcaaacaagattgccgttgacttaacccctatttttaaatcgtcatctctatcaaccatggcatacatggtgtcataagccacagtccaaacaagattagcggtaaatagtagccaggcttctaatggtactgaaccaattgatgccatataggccatcggaattgcccaactaaatgcagcaccaagcactacttgcggtaattgggtataacgcttcataaatgggtaacaaaacgccagtgctaaagcaccaaatgaaagcaaaatagttgaccagctaagtaacataaccaatccgaatgccactgcaataagtaacacaaacaaactcattgcctctgcactagaaaccagtcctgcagccagagggcgctgagcagttcgctttactgaaccatcgattttacgatcggcaaagtcattgatcacacaacctgcacttcgcatcacaaagacacctaagctaaacactacaaaatttaacaaactaggcgtgccttgattagcaagccataaagcccaatatgttggccacaatagcaacaaagtaccgattggcttatccgttcgcatcagttgtttgtaataaggaatgtttgcgcgatgtaatgcagctaatttcataagtagatatatgcctcaggtaagaacacttcagccacaagaaagtgagcatttgataatgcgaacacgctgcgtcggccccacaatgaatttgacggtaagccaaggtgagctgttaacgcttgaatagtatgctgctgagaaaattcagccacctcgatttctgttcgctgcaagctggggtcttgaaaaataacatcgccaagcggcctcgtccccatatttaacaactgctgtttctttaaagtatcgtctgctggtagccaactctgcgcataaaccataggtttaccatcgcacaataatagcacctcgcggtttaatgcctgacttaaagaggtatttagtagcgcttgttgctcggcagttaaatcaaaaggcgcttcgtttagtacctcaactgaaaaagcctgacagtgacttttgagcttagctgttaatgaaccggcttcaagcagccaaccttgctgttgttgcgtcaaatctggaaatgctgaagcaggctgccaatttgcagctaatgaaactgggaatgtgatcacaacgactcattatttttaaaaaccgtgcaaatgatatcactgctgcacgtttggcaaaagtcatgatttaatctcaagcacggttaaaaatcacagaacagcctgtatctcaagcgaatttgggtatagactaaaaccattgaaagggtggaatatttttaattatgaaaacatcagtgttatcaatttacttagtcagtatgctactaattggcgcaatgaccagtctgtctgcacaggctgagtcaaaagttggctactttggttttgagcctgatatcatcaccaactacataggccaaggtaataagaagctaggctacgtgcgcattaccgttgaccttatgctaaatgatacagccgatatcagcgttgttgaacatcacacccctctactgcgtgatgcgattgttgaaatactctcaaaagagcctgaagaaaacattaaatcgcttactggtcgagaagaaatcagaaaacgctgtactgcaaaattaaagtcactacttaaacaagaaactggccaagaaattgtcagagaagtgttatttactaagtatttgtaccattaatagtttgtttaataaaaaaggcggtttaaccgccttttttatttacgtgtaagcagcttatcagacaccgcatatgccataccagccagcaaacctgctaagtgagcccaattcgccatactcactggcaacatatctacaaagcctagaataagccaaaccaacataaaaccaacaatactattgctgactaaaggtggttcgttagggcgcattgcactataaatccagcaaaacccaagcaaaccatacacaacgccgcttaagccaccaaagttaggcccgacaagtaaaaactgcgcccaattactaataaacgccgtaactaaaaataaccctactaaggttaatttaccgctgcgcttttcaatatcgttacccagcgtcatccaccagatcaaattaaaaataagatgtatagagctaaaatgcacaatggcaggagtaagccaagtaattggcttggcagggttaaattggagcatgccataaatagtttcaaagccgcccatcagaaaagcaacaaagatgactatagatactaaggttacggtacgattaagccaacttaaagccttaaatcgcgcttttaaatcaagtgattggccttgatatgataacggcgattgtgtacttcctacctgccatgaagcttgtaagtacttttcatcgttgggattttcagcaaactcttgccataaaggttgagcttgatgaaaatgctctggagcaacacaaataatcacagtttgtccatcttgcgagcgcagctcaccttgtaatcctttacttttaatgtagtcaataaagccttgtgcggcgcgcggattatttatgctgcccagttcaatcatcgttctatatgctccggaagttgcgtttgccacgcagtaaagccaccatccatgctgtaaacatcttcaaagccttgttcaactaaatagctcgcagcaccttgagaactaactccatgataacaaacaatgacgattggctgatcaaactctttgttcatcataaactcgctgatatttgcattcgataaatgctcagcgcctggaatatgtccgctttgaaatgaattcggatcgcgaatatcggcaatcacgacatcgtctttttctaacagcgaaaaggtttcgctaactgaaatatgtttatacgacataatactctctaaactaaaaaggcggcctaaagccgccttaattttgaggcttttagaccttcatttaatcccaattcaggataactttaccagactggcctgaaatcattgtatcaaagcctttttggaagtcatctaccgaaaattgatgcgtgataattgggttaagatcaagaccagactgaattagactcgccatcttataccaagtttcaaacatttcgcgaccataaatacctttaatgataaggcctttaaaaataactttgttccaatcaaccgccatatctgaaggtggaatacctagcatagcgatttttccgccgtggttcatgttatttagcatgctattaaatgcaacgggtacgcctgacatttcaagaccaatatcaaagccttctgtcatgccaagctctttcattacatcttcaagcttttcatttgctacatttactgcacgagtcgcacccattttacgtgctaaatctaggcggtattcgtttacgtctgtgataactacatgacgcgcaccaacatgtttagcaaccgcagctgccatgataccaattgggcctgcacctgtaattaatacatcttcacccactaaatcgaacgacaatgcggtgtgaactgcattaccaaatgggtcaaaaattgaggctaattcatctgagatattatctggaattttaaatgcattaaaagcagggatcacaaggtattctgcaaatgcgccttcacgattaacaccaacaccagttgtattacgacataaatgcacacgaccagcacggcagttacggcaatgaccacaagtaatatggccttcgccagatacacggtcacctacttggaaaccacgtacttcctgacccatatcaattacttcaccaacatactcgtggccaacaaccataggagttggaattgtattttgtgcccactcatcccatttataaatatggacatctgttccacaaattgctgttttgcggattttaataagcagatcgttatggccaacttcaggctttggcgcatcagtcatccagatccctggttctgcttttaatttagataatgctttcatgatttacactcaattaaacaaaaccgaagcaaaagcttcggtttaggaaataaaattagataacacccatttctttaccaatacgggtaaaggcagcaatagcggtatctaattgctcttttgtatgcgccgcagagatctgcgtacggatacgtgcttggcctttaggtacaacagggaatgagaaacctgttacataaataccttcggcaagtaatttgtctgccatcatagaagcgacttttgcatcgcctaacataactgggataattgcatggtctttacctgcacaggtaaatcctgccgcttccatttgttcacggaaatattttgcgttatcccaaagttttgcgcgtaactcaccgccattgcttagcatctcaagtactttaatcgatgcagtaacaattgatggcgcaagtgagtttgagaaaagataaggacgagaacgctgacgtaaccactctacaatttcttttttaccagatgtgtaaccgcctgatgcgccaccaagtgctttaccaagtgtacctgtgatgatatcaacacggtctagaacaccacagtactccggcgtacctttaccattttcaccgacaaaaccaacagcgtgagagtcatcaaccataactaaggcatcgtatttgtcagcaaggtcacaaaccgctttaagattacaaatcacaccgtccattgagaaaacgccgtcagttgcgattagttttgttttagcacccgcttcatcagcagcaataagttgcttttcaaggtcgctcatgtcgttattagcgtaacggaagcgctttgctttacaaaggcgaacaccatcaataattgaggcgtggtttagcgcatcagagataattgcatcatctgggccgagaattgtttcgaataaaccagcgtttgcatcaaaacaagatgagtaaagaatcgtatcttcggtttctaaaaactcagaaatcttttgctctaatgttttatgaatatcttgagtaccacaaataaaacgcacagaagcaacaccaaaaccatggtcatctaaaccttgttgcgcggctttgatcagctcagggctattggctaaacctaaatagttgttcgcacaaaaattgattaccttatcacctgaggcaacttcaatttgagcttgctgctgcgatgtaataacacgttcacttttgtataaaccttcagcttttacttcgtcgatttgctgttgcagctgattaaaaaacgcagatgctctcatctgtaatctccaaatattcttgtatctaaccagaaatgattagcatgactgtaaaatttgcgcctattgtaaaagcttagacgaacaattgcactgtttgcagttcgtcgcaaaccttgaggctaaagaaataaaactggtcttacctgctaagactgtaaaattaaagcaggtaaatcagctaaagactcacatacgtaatcagcatgttgttctgttgattcagcataactttgccctgaacgaaccagcacacgggtcgcgatttgcactctttctgctgcaattaagtcgcccagcttatcgccgaccataatactttgtgagggagtaatactatgctcttcaatggcttgtaacagcatgcctggagcaggcttacgacaatgacaatcctgtaaataggcaggctctgctttagtcggatgatgcgggcaaaagtacacatcaagaattggcacgtcatgacgcataaactcagctttcatccagtctgtaaggtttaaaaagtcttgttctgaatagtagccacgcccaatacctgactgattagtcacaatgacaatttcataacctgcatcaataaactttttgcacgcatcaaacacaccgggtaaaaactcaaactcatccggtttatatacataaccgtgatcagcattaaccacaccatcgcggtctaaaaacagtactttactcatgacaattgctctttatctacaacacggttaaacatagctataacctcatcaatgcttatttgcgtcattaaatcagctcctttaacgcgtgttccccaaggtagctcttgagctgttttgcctgtttgttcacgtaagttttggtggtacacctcaaccacgtaatctagatacaagtatggacctgtacgtttcgggtttgaatgggcatacaaacctattacaggtataccaacagttacagccatgtgtgcaggtcccgtatcaggagctaaaactaaagaagcgcgctttaatacacacaacaactctttaagcttagttttacctactaagttaagcacaggcgcattcgtttgcgaaattatttgttcagacaactctatttctaaaggtgttggtcctcctgtgataaccaccgaaaaaccttgctgataagcatgctctgcaagtgccgcataacgctcgggcaaccaattacgctcttttttacttgccgcaggtgagataacaaaaatacgcccagctaaacgttcttcacccaataaggcatcagcagcttgttgatgttcatctgtgattggcatttgccagtgaggcgcatagtcaggtacaccaattgcttgagcaaagcccttaaagccctcaaggacatgtgcctcagattgcggggcaatacgcttattaatgaataaactatgtaactcttttgaacgagcccaatcaaaccctactttgacttttgccggaatacaacgagctgctaaatttgctcttagtgctacttgcatgtgtaagagcacatcaaatttacgacctttgaaagtatcttttagttgctgataggcctgtttaccctgttttttatcaaatacaacaaattcaacgcccggtaaatcagccaacaacatagcctcaactttacctatcacccaggtaatttttgccttcggatgtgccttttgaattgcttgcactgcggatacggcgtgacatacatcaccaatagccgaaagccttaaaatacaaatatctgaataggaggttgattgagtcacgtgcgcccttagctacagcaaataatatgcgatcttaaattaacttgatgctaatgcaagcacttatgcgaaaagctaaaaatacggtaagatagcgctaattctatttaatcttgaagttgttatgttcgaaactcagcatctacaaaacaccacccttttgtgtcaccctgactacaaagatgagctcacgcaacagtggttcgatgccagctactggcaacaacaagaaaaaatagttggcgcaaaaaaaggccgcgcaacagcgtggttttttaaacatcaacagctcacaggtgttctgcgccactattggcgaggaggactcgttggtaagctactcagcgatcagtacctatactttggcttaaaacaaacccgagtttataaagaatttacactaatgatgcgtttgcgtgagcttggcctgaatgtgcccacaccgattggggccaaaattaaaaccagcggctttatctatcggggcgatatcatcaccgaggcagtgacaggcgcaaaaagtgtgttagatattttaatcactcgcccactaagccagtctgaactcaaagcgattgcagccaccctcagcgattttcacaatcacggggtataccacgcagatttaaacatcaataacatcttgttcgatgatactggtacggtgtttatcatcgactttgaccgcggtgaaatcaaaaagccgcaccctagctggcaaacagagaatattaaacgccttgctcgttcatttgcaaaagagcaaggccgtaacgaagaaatgcattggcgacaaagtgattggcagtcactaatatgtgactaccaagctttgcttaagacttaatcttgctaattacgttagatgttgagcaaccattaagaaactcaagcacttcgactttaccgccatggcgtaatacatgatcagctccggcaatttggtcaacggtgtaatcgccaccttttactagtacatcggggctaatttgctcgatgagcttagctggcgtgtcattctcttcaacgctaccaaatggaataacccagtcaacagacgccagcgcacttaaaaccatggcacgttcatcgagtggattaattggtctttgtgggccttttaagcgagtgatagactcgtcattatttaagccaacaacaagcctgtcaccacgagcttttgcctgtgcaaggtagcgtacgtgacctgcatgaagaatatcaaaacagccattagtgaaaacaattttttcaccattttgtttggcaaactctatatgctgaagtacatcttcaaacggtgtttgataatgctcgccagtttgctgtaaatattgaccaagcttacggctgagttcttcaggcgaaacagtggcagctccaagcttgcttacagcaatacctgctgcaaggttggcaatttcaaccgcatcttttgctgccataccagcgcctaacatcactgctaatgtcgcaattacagtatcgccggcaccggttacatcgctaacttcaagctgttgggctgcaaaatcatgtttttctgtctgactaattaacgacataccatgctctgagcgcgttaatagcatcgcagctatgcccgcttcactaattaatttacgagcactgtcagtcaagttttgctcagagtccgtcaaaccaccagcaagcttaaactcatttaggttaggcgtaatatagtcagcaccacggtataagcttaagtctgatgatttagggtcaataagcactgttttgcctgctttctttgcaacctgaaccatttgttgaattaagctcagtgagcctttgttgtaatcagagaacaacacaaagtcataatcatccaatactagctctaggcgattaagtaataattgactgtgctggtcagtgaaggtttcttcaaggtctaaacgaacaacttgctgatgacgactaataacacgcattttagaaattgtcggtaagtcacacacacttacaagttgcgaatcaattttttctgaacttaagatggtttcaagaatttgcccgctttcatcttcaccgactaaacctaataggccaactttaccgtctaaacgagcaatattttttgcgacgtttgctgcaccaccggctttgtcttcaaatttactcactttcactaccgggaccggtgcttcaggtgaaattcgcccagaatcgccatgccagtatctatctagcatgacatcaccaacaactaaaatacgtgcctttgaaaggttttttagtaacgctaaatccattacttttgctccgctacaaccatatcgatggcttcacatagccaatgcccgatgaacatgtgggcttcttgaatacgtgcggtttcatcatttttaataataataggtaacttagcgatgtcttttactttgccaccatctcggcctgttaatgctacggtaaaagcgccgatttcattagcagcagcaagcgctaaattaatattagggctagtacccgaggtagttaagccaataaccaaatcatctggcttacacagggcctgaacttggcgctcgaatacagtatcaaagtgatagtcattgctgtgcgctgttaaaattgaggtatcagtagtcagtgcgattgaagcaagtggaccgcgctctaatttataacgcaccacaaactcagcagctaagtgctgtgcatctgccgcacttccgccgttaccaaaccaaatgactttgccacccgcttgcaaagcactgtgacatgcttcaagtaattgcatcacttctgggtggtaggtctccatcgtttcaaacaacatttgatggcgatttaaactttcgaggtagcttgccgctacagaatcaagattagacatataaattccttaaaaagtattaacggcttacttaccaaaaataggcaacagataaccacgtatagttatcgccaaatacatcttcgccataggtaagagttgtctctaatgtatgctcgtttaattggcgtgtattgcttaattgcagttcaacggcacgctcatagtctccggtcgtttgaccccactcatttaggtaattactttcgttttctatcagtgtgagcttactgcgccaaagtgaacggtagttttcactataagttaactccatgctgtgcacttgcgtcggtggcgcatctgcataaaccctcgcaacaccattcgcatgtaactcagtataacgttgatcagccgcataatgacccgttacaaaaccacccactgtattaccatatactggataaatctcattgacgtaccacaggctgtgcatgttggtatattcatacctaagcgacattgtattactcagttttggcaagaagaagccaaaattgctaacagtattaccaaattggtagtttttgtggtcttttgtgtcttcaccaccatattcaaagtaaagttcaactggcattccccaattaaaattcaccgtactggtaattgttacgtattggtcacctaactcattatctttactaccagtgagccctgagttgtcattacccgctggatcaaaaaatgcatcgaccacatcaccaacatcgactttgcgggggcccccaccaaactgcatcatacgattaaggcccagcttccaaccatcaagtggctcaatactaaaatgcgtccctgcgagctttggtgtgccgctatggagctcattttgataaagaataccattatcgacatgctcaagctcagaataataaagctcaaaatcaaaattccaccaattgtgggctggttttaccatacccaatgaaatcgaaggtgctgttttagcattggtagaaataatctgcgcagaatgtttaaacggcgagaaccagtgttctttataaccaagatttaactgtaaatcttcgccagcaaaacttataaacgaattataatttacaaatttattagctttagctcggtaatctacacccacttgtaccaaggtgtaatcattagcacgccaaataccttcaaaaaaaccttgcccccattcatccgagcttaggcctctttgattcgctattttctttgcattatccgtatctacttgtagttttacaccgacacgagtcactgcatcatcactttgatatggctttatttttgaacgaatagcagcagctaacccaggctcttccttttcaagtacaagaagtgctttctcgacttctgctaaacgatatggtttagccataggagtgccaattgttagtgcaaacaaagtatctaattgatgatcaagctgtgcgtccatgccaacaggtaaataagcggtgggtgttgcatataaaggcatagcgcaacttaagagagcacctactaccgaggcttttatcattttaaatttcataactgcttcgtttatttaataagtaatcgaaatactaccaaattacctgaaactaaacacttaaaactctcatagataaccctttttaacattttatatttagatagcgtatgttccacgctatcatagggttttattcatataggctaaccaatggcgcgtattatatattctttactcctatacattttgaatccgctgattgttttttacttatatgttttgcgaggtaagaaaaaccaaggctaccgaatgcattttgctgaacgctttggctatgcagatttatcgcgccacgatattatttttcattgtgcctctgtaggtgaagtgctagcggcaaccccgcttattaaggcagttcaattcgaacaccctgcgcttacgattttagtaacctgcaataccccaactggccgcgagcaaataaaaaacaactttaacgatactgttagctgctgttatttaccgattgattttttcttcgctacacagcgttttttaaagcgtatcaagccaaaggtactgtgtattttagaaacagagctgtggcctaaccttatggctcaaagcaacaactacggcacaaaagtacttgttttaaatgcccggctttcagctaaatcacagcaaggctatcaaaaggtgatgccattaactaagctgatcatgcaatcaattagcgaccttgctagtcataatcaagatgatgccaaacgttttattgaactaggtttaaaacctgaaaaggctcgcgtgtttggctcaattaaatttgatatcacgccgtcagatgagcaattaaataaagtcgcaacacttaaaaatcagtataacaacgagcgctttatctgggttgcaggctccactcaccctgttgaacatgagcttattttaagtgctcataaaaagctgttaaaagccttgcccaacgctcttttgattattgctccgcgtcaccccgagcaatttgataaagtcgctgaagttttaaaaaactcagatatgagctttagccgtcgcagtgcagataactataacaaccagcaagttgtgctagcggatacgttaggcgagctacaatgcttatatggagtggcaaacatcagctatattggcggtagtttaatagagcgaggcggccataatccgttagagtcagcagcgttttcggttggcgtattagcaggccctcatacctataactttgaccatatataccctgagcttattagtgctcaaggagctaaaattgtcactgatgaaaaccaacttgctgacacgcttatcgctttgagtaatgatgcagaacagaccataaagcttggtcaacaagctgcaaaatgcgtggctaataatcaaggtgctatcagtaaaacggttaatttaattgagctttacttagaaaagtaaaatagagacatagaatagagaaataacgtgacttcaaagcaagtgatgaatcgcccagaaatacaaatgcgtgaatgggtatcaagtgtaatcgtgaaatacaatttctgcccgtttgcccgcaaagaagttgaaagcaattgcattcattatcaaatcagccagtctattacacttgatgatgcggtaatggatatgcttgagcagtgtagcgagttagaccaacaagcacagcgtgaaacaaccctgttgatgtttgagcaaggctttaaggattttgaagagtttttagatttagtcgatttagctaatgcgcttttagctgcgcaaggttatgagggtaagtatcaaatagctaactttcatcctgactatgtgtttgccgatagcgatgacagcgatgctgcaaactatactaaccgcgcaccttatccaacactacatttgatccgtgaagccagtatgagcgaagcgttagataactacaatgaacctgagtctatcccagagcacaacattaaacttgcaagacgtaaaggcatcgacttttggcagcagctattacaaagctgcatcgataaacgctaacgcctgtcggcgttataaagataaaaagccagcaatgctggcttttctaatttaacttagtgagttatttttttacccactcaccgttcacttcaatgtagtggcccggcttcgttttttcgatagttttagcagctgcaagtgcttctacctgcgctaacgaaaggttattctttttcgctagctttaagtactgctctttgcgctttgcattaatttcatcaacgactgcttttgcttcactattattaaccactaaacctaaatagcctgagctatcttcacccactaagccttggctctttgcgtcatcaaggctaatagcccacgcagaaaaagagaaacaaacagcactgatcaaggtgatcacatttagttttttaagttgtaatttacgcatgtgtgctccttagaataattcgctgtcatcactgaataaggtatcaagttctttatccacttttacgcggatctcatggtcaacttttacatttaagttgattgtaatcggctcttttgctgccacctcaacacggtgagtacaggcactcagcatgcctactgccgtcagcattactaaccacttagccatcattgcttcctttttttgcatactctttctcaactttttgagtaatttcatcacttaaacgcagcgctctaagtaaagtaaatacattctcttcatggttataattaaagttcactgcttgctgctgcgcttcattataaccttctaaattaacacctaaatgtaaccaaccatctggtttgaggttaacactgctgcgtagttttttaatatctaaattctcgagtaaactcagcgttgtactcagctcctgttgctgcgcttttacagcttcaaaacccgcattattagtgatcagtaatttaccatcaccttgattaactagctgcccttgctttacctctatgccctgtttgcttataacaacaggtaaggtgcccgctaagcgcccgcttaaactaattccagactcggcatcaagggtgaccaatttgctggcatcaatattttcaaacttaacggtcgcggtttggttgtcactcagtgggcagtatttattcaccacaaatttgccgcccataacctgaccggttagatcagctgcgcaaggctgattagccgttacctgcaactgaccctgcatatttttgaccacagcacctgcgcgcagttcattgagtgtaaatttagtcgctgcaatattaagctgccctgaattaaacgtcccatccaaatccacggcaaaatcatttgctaggtagtcattataaagcgcactgagcttattaatgtgaacactaccttctgcttgctgaagatttacatcacctttaataatccctgaaaccagcccatcagtgatggttgcaaggggctcaaactgagcaattatcggattaagcttggatactgcctgctcaggtatcaccaattcaaatgggtgcgcaaccttagacatatgatggctgacaagcgcttcaaagccatctgcaaacacatgatgcgttgcctgcaaagcgcggctttgtagggcatttgtaacgacagacaacttatttaaagtaagttcaggtgttgataatttagcagccgtagttttggcatcaatatcagcaaataattcccccacactgagatctgtactaagggttagctcattactgatttttgctgcgttaatatcattataattcaatgatttaaccttactgttggctttaacaattaagtgttgctcggcattatgctcagcctcaatcgtgctggtaaagtcagctatctgagcacccgatataagcgcgtttttaacactgacatttgcgttcaatctagcagctatcgggctagaaaataactcatcgatatttagctttcctttagccccaataccctcaaccagagcaccgtcagcctgaaaatctaaaaatgcagggagtgattcaagtgacagttgaaaatcagcgctaacgtcactttcatgcaaatgcgcattgagctttagctcatcaatatctttactgttaaaatcaatactaacttggctattaagtgatgcgagcggatcctgtaaagaaaaggtcgtattattgactgtcacttcactttgcccttcagttgctagcagttttacgattgggactgatagctgctcggcttctacactaaccggtttgtcaatgtgtaactgccaagtaagcggtagctgcgcttcaataaatgattgatgctgttggtctgtgatgatgcttaaacacgcttggtttgcgctaagttgattttgtaaagctgataaatccgcatataaatgctgttggtttaattgatacttcgcactcagttgcccttcggtggtaaaacctaggtcgcattgcgctagagcatgctgataacttgcattgatggtgctttcaattgcaaccgtaataccatcaaacttaacctgcgattgagtgccaaaatggctactttgtggcaatgttatgaaccgcctagctacttgctcatcaagggtaagatcggcttttatttcataattagatatttcaacatctgcattaagatcacgtgaaatcgtaaaatggtttaagcgtttttcttgtattgccaacctaacagggctatcggtaaaaggtgagactacatcaagctgctcaatgcttattagcggtctttgctctggtaatactaaagcgagctttttaaattcagtctgtgctgattctggttgttgtttatttgcaaggtcgctaacgatgagattagcgcgagaaaccctaacctgttgcttgttagcaaggatgccagctaactctatttgctgcccttgataagttaagcataatttctcgatatttaaatcaagctggctggtcaatgaccaatcaatgcagtgaagctcagcgccatttttactaagcataggcgttaagtaccacgatgtcagtggtagcctgaacagatacgccaacagcagcatgcttagcacgatacctagcaaccctacgcttacccgcttaaaactcaaaaaactctccttgcctttgaacttacacttactagcaccattataaacaaaaaggctgcacttaatagtgcagcctttttagtttaaacggtttgtatgaacctagcttgtatagctaggtatatagctaagttttagccaacgtttttacgtgcgttgcggaacatacgcatccatgggctatcctctgtccactcatctgggtgccatgagttagcaacagtacggaatacacgctctgggtgcggcatcataaccgtggcacgaccatcagtagaggtaatacctgtgataccttccggcgagccgttcgggttagctgggtattgcgttgttgggttaccgtagttatcaacaaacttcactgccacagtgcctgactcaagcgcagctttaactgcatcgctgttagcgaattcagcatgaccttcaccatgagaaacagcgataggcatacgagaaccagccataccgttaaagaatactgatgggttttcttgcacttctacaaggctaaagcgagcttcaaagcgctctgacttgttggttacaaaacgtggccagtgctcagtgcctgggatcaactctttcaatgttgaaagcatttgacagccattacacacacctaggctgaatgtatcttcgcggtggaagaagctttggaactgctcacgcgccatctcattaaataagattgacttagcccagccttcacctgcgcctaatacgtcaccgtaagagaagccaccacatgccactaagcctttaaattgctcaagtgttaaacgaccttcaaggatgtcactcatgtgtacgtcaaccgctgcaaagccagcacggttaaatgccgcagccatttctaaatgagagttaacaccttgctcacgtagaatcgccattttcggcttcgcaccagttgcaatgtaaggcgcagcaacgtcttcgtttaagtcaaagcttagttttacgttaagacctgggtcttttgcatcaaacttagcgtcaaattcttgcttagcacactctgggttatcgcgacgtgcttgcatttggtaagttgtttcagcccaaatagtgcgaagctcagtacgcgtgtggttaagcaccacatcatcaccacgagtgaataccacacggtcatcagcgtttaatgcaccaatttcatggctgatagctgctaagccgtgatcagcaagaacggctttaactgcatctaaatcagcgtttgccacttggataaccgcacctagctcttcattataaagcgcttcgatgtctgaacctgtaaggcctgcaaggtcaacagtaacacccgtgtgaccagcaaatgccatttcagcgatagttgtgaataaaccaccgtctgaacggtcatggtaggcaagtaacttgttatcagcaacaagcgcttgcattgcttcatagaaaccttttaataactcagggctatcaacatcaggtgttacatcacctaattgcttataaacctgtgcaaggcttgatgcacccatacggttttgacccgcacctaaatcaactaataatagtgatgactcacctttatcagtgcgtagctgtggcgttactgttttacgcacatcttcaacacgaccaaaggcagtgatgattagtgataatggtgcagtaaccgatttttgctcaccgttttcatcccattgagttttcatcgacattgagtctttacccacagggattgttaagccaagtgccggacaaagctcttcacctaccgctttaacagcttcgtaaagacctgcatcttcaccagggtgaccagctgcagccatccagtttgcagatagcttgatattttcaaggccacctatgttagcacacgcgatgttcgttaatgactcagccacagctaaacgagcagaagctccatagtttaacagtgcagctggtgtacgttcacctagtgacattgcttcaccgtggtaagtatcaaacgcagcggctgttaccgcacagtttgctactggcacctgccaaggacctaccatttggtcacgagcaactaaacccgttacggtacggtcaccaatggtgattaagaatgttttttcagcaatcgttggtaagcgtaataaacgttgtgcagcatctgcagcatcaatgtttgcaacgtctaatggttgtgattgtgcttttttagactcaacttcgcggtgcatttttggtgctttaccaagtaaaacatcaagcggtagatcaacagggttgttaccaaagtggctatcttcaaccgttaagtggcgctcttctgttgcttcaccgataaccgcgtattgtgcacgttcacgtttacagattgcttcaaagcgcgcgaagtcttcagctgcaactgctaatacgtaacgctcttgagattcgttacaccaaatttcgtgtggtgccatacccggctcatcgtttggaatatcacgaagttggaatttaccaccacgaccaccgtcgtctacaagctcagggaatgcgtttgaaagaccacctgcacccacatcgtgaatgaaagcgattgggtttgcatcacctaactgccaacatttgtcgataacttcctgacaacgacgttccatttctgggttttcacgttgtaccgacgcaaagtctaaatcttcgttcgattgacctgatgtcatactagacgcagcaccaccaccaaggccgatgttcattgccggaccacctagtgcgataagttttgcaccaactgggatttcacctttttgaacatgttcagaacgaatattacctaaaccacctgcaagcataattggcttgtggtaaccacgtacttcttcaccgttgtggcttgatactttttcttcgtaggtacggaagtaaccaagtaagttaggacgaccaaattcgttattgaatgccgcgccacctaatggaccttcagtcatgatatctagtgcattaacgatacgaccaggcttaccaaagtcggtttcccatggttgctcgtaaccaggaatacgaaggttagatacagtgaagcccactaaaccagcttttggtttagaaccacgacctgtagcaccttcgtcacgaatctcaccaccagaacctgttgatgcacccgaaaatggcgcaatcgctgttgggtggttgtgagtttcaactttcatcaagatttcgatgttttcttgatggtatgcgtactcgccttcactgttcgggaagaaacgacccgctactgagcccttcattaccgctgcgttatctttgtatgcagataacacattttcagggtgttgctcgtaagtgtttttgatcattttgaacaatgattttggctgttcgatgccatcaattgtccagtcagcattaaagattttatgacgacaatgctcagagtttgcttgtgcaaacataaataattcgatgtcgttcgggttacgccctaacttttggaaattttctaccaagtaatcgatttcgtcatctgcaagcgcaaaaccttgctcaacattggctttagcaagtgcttcacggccaccacctaaaatgtcaactgatgacattggacgcggttcatcgtggcggaataatttagctgcatcagccatatccgcatgcgttgcttcagtcatacggtcgtgtaataacgctgctacttcagctgtttgctcagctgatagattaccttcaacgtagtatgcaataccacgttcaacacggtgaacttggcttaagccacagttgtgtgcgatgtcggttgcttttgatgcccaaggcgagatagtgccaggacgcggcgttacaagaattaacgtgcctgcagggctgtgctctgcaatcgttggaccataagtaagcagcttttcaagctttgtttgctcatcagctgaaagctcagcagtaagatcagcaaaatgcatgaactcagcataaacgttagtgactggaagttgtgcctgttggcaacgcgctaaaattttctgaactctaaaatcggaaagtgctggtgcaccacgaaggatcaacataggtattttcatccggggttagggattgaacgatattttaggcgcgtattatagtgcaaataacgtctagatttaactcaaaattgcgcttttatttaaataatcttcataaccgcgattatggttgcaacaattaactatcttagtactctttattttcccgcaggctgttgttctgtatgacttatctattaccgctactattacagttattaatttttaaatagagatataaaactatatgcgaagtgacgtggcagtgaagttttgctataacggtaacgtaatggtttaaggggcatttctaatttatgcaaaaaatactcgctatatttacgcttgtgctcatgttgtgtgcatgcgatatgcaacaacaaccatcacaacttgctcatatcaaagcacagaataagataagagtcggcaccttagccggcgcgagtaattactatcaagcaccgcaaggtgtgcagggttttgagtacgaattagcacaagagtttgccgattatgttggcgtagagctcgagatggtgcctttttttaatcttacagatatgttctctcgcctcgaaagtggtgatttagacattattgcctctggacttacttataataccattcgggctgaacattatcgttttgggccaacttaccgcaccattagccaaaagctagtatacaagcaaggccgcactcgccctcgagaatttgccgatttaacggggaacctaacggttcttgcgaaaagtagtcactcacttgcattacagcaacttaaacagcttcatccagacttaacatggcatgaaacagaagatatggatgaagaagaacttctgcaagcagttatagacggtgaaattgattacactctcgctgactctcacaccttgtcattatttcgccgctaccaccctaatttaagtatcggcttttcagtgactcgtaacgaccctatcgcttggttactaagaaaggatggtgacgattctttatatgccttgatggtgcccttttttggtgatgtaaaacaaaataaccaactttatgtattagaagaaaagtattttggccacgttcgtcagtttaattatgttaataccttagcctatatcgaagctatcaaagaaacactccccaaatatcagccttggtttgagcagtattcagggaatattgattggcgcttactggccgccttgagctatcaagagtcaatgtggaaccctaaagccaagtcaccgacaggtgttcgcgggatcatgatgcttacgcaaactacagcaaaacaagttggcgttactaaccgtttagagcctgagcaaaatatcaaaggcggtgccgaatatttagcgaaggttatttcgtggatccctgaacgtattccacaacccgatagaacttggtttgccttagcctcttataatgttggctggggccacgtaaatgacgcgcgaattattaccgagagagaaggggcaagccccgataagtgggcggatgtaaaaaaacgcttaccgcttttaattaaaaagcgttattatcgtaaaaccaaatatggttatgcacgtggcgatgttgccgtgcagtatgttgacaatattcgtcgttattacgatgcgttggtttggcttgatgaaaatgatgcaattgctgacccaagtgaagaagagcaagccattgaagaggttaacacttccacagaaacgagcgaaaagccaaacgacacaacacaaccagactcccaagagcagcagacgttagaaaacaactaacctaaagcaccagaaatctgtttacttgtcatcaaatgatcattatcttttagtagaaatggaatggaccatgccatgcttttctctcacttaaggagcacacatgttaaaaagaagacgcaagacacataagttcaagcgtaatgttatttactcaacagcgacacgccgtcgtatcatgctgcgtaatacacacaaaaaagttatttggcgtcgccgcttatttgcgatgcagttaatggaagctcaagttcctgcaacgccggttgtataactaggcgttgcgagctgcaagcttagccgcctttttctcttctctacgacgcttaaaaaacttagatatcaccgccccacactgctcactcataacttcaccggttacttcaacttgatgattaagccttggttcttgtaatagattcataatagaacccgcagagcccgtcttggcatctttagcaccgtatacgagtcgcttgatacggctatgaaccaatagtcctgcacacatcgaacacggctcgagggttacatacaaggtgcaatctattaggcgataattattaagtactttgcctgcttcgcggattgccatcatttctgcgtgagcggatgggtcgttatcggtaattgagcggttatagccaaaagctattagttgattgtcttttacgagcactgcaccaaccggaatttcattaatcgctgccgcttcattggcaaagctcaatgctttttccatccaatactggtcgctaaattgttcgctcatatatcacacaaatcttgtaaaactgtgagtaattatacctagttagtgaaaaatgtcggcaataaatactgctacacttaaaaattaacgcaaaatttagtggctttttcatggctcaacagcctcatattgcgctataatctcgcgctttttttatttagcttacaacacgggtagcaaatgaaatttcctggacgccgcaggcataaacattattttccggtggaagccaaagatccactgacgaatcaacttaactcaaccgaacgactacaacgtagttatattacgggtatcgaccaaattgtggtggatattgaagcgaaagttgatcaagctttcctagatgaatttcaattgcgccgtggcatgtcgcaagtaatcgatagcgatattaccaatgcgttatacgacagactgaaactcgacaacatgatcgactatgagtttgccggcggtacagtaggtaacaccatgcacaactactcaacactagctgacgaccgttcagtgttattaggagtcatgagtgaaaacattaaaattggtagctatgcataccgctttttatgtaatacctctagccgtgttgatcttgattatcttcagcctgtagacggcccaattggtcgctgctttaccttgattgacgaaacaggtgaacgtacctttgcgatcagcgctggacttatgaatcatcttcgccctgaatctatcgatcaagaacttattgagaactcttcagcactggtgatcagcgcatacctaatgcgtacgcaaggtgatgaaaccatgacagaagccaccatgcaggcagtaaaatatgccaatgatgcaggcgtacctgtggttttaacccttggaactaagttcttaattgaacaagaccctacctggtgggctgatttcgttaaagaacatgttgatattcttgcgatgaacgaagaagaagggcttgctattactggctttgaagacccacttctagctgccgacaaagcactagactggacagacttagttatttgcactgccggcgaaaaaggcttatttatggcaggttatgtagacgattcattcaagcgtgaaacagaatatccactattaccgggtgcgattgctgactttaaccgctatgaattttcgcgcgctatgcgtaaagacgattgccaaaaccctattcgtgcttatagccacacagcaccatttatgggtggcccagacagcattaaaaacaccaatggtgctggcgattgtgctcttgctgcggtattacatgacttatcagcaaacgtttaccacaaacttaatgtggcaaactcagcgaagcatcagcaacctgcaatgacttactcatcacttgcacaaattagtaaatacgctaaccgtgcaagttatgaagtacttgttcagcactctccacgtttatcgcgtggtttacctgaacgtgaagattgtttagagcaagtttactgggatcagtaaccgcttttagaaaatcgaaatatccagtttctgggataaacgctcaagagcggctatcccagctactgagttaccatacgaattaagccttggcgcccaaacagccacagtaaattgattcggtaacacagctaatatggtacccgatacccctgatttacccggcataccaacacggtagccaaaatctcccgcagcatcgtacaaaccactggtaaacagtaacgagtttaactgcttattttgtctggcgctgagcactttattgccgctggcatctttaccttgattcgctaagtaattgtaagcttttgctaattctatgcagttaagttcaatggcacagaagttaaagtaggcccataacacatcatcaacctcattattaaagttgccaaatgatttcattaaatgcgccatggcggcattacggtgacgaaattcatattcagaatttgcgactttcttatctataacaacctgaggattccctgataactgacgaaatgactcaagcattgaatgcatcggtgctgataaacgactatataaagcatcacaggtgacaatagcaccggcgttaataaatgggttgcgtggtataccctgttcaaattcaagctgtgttagtgagttaaaggctgtacctgaaggctcttttccgactcgttgccacagctcatcaccataacgctgaagtgctaaggttaaggtcattactttagaaacagattgaatagtaaaacgtgcaccacaatcacccgcacagtaggttttcccatccacggtatgaatcgcaatagcgaactggttgggctcaacctctgcaagtgcagggatataatcagcaaccttaccttgactcagtaatggctgaacttcttttgtgatttcatctaatacatgttgataatcaatctgtgacataccgcgtccttaaaacaaaaagccccgcatttgcgaggctttgtagtctactaaagatggtttgctatagcgattgctattagctcattgctgattgcagttttttcatcgctgttttttctagctggcgaacacgctctgctgaaacgttatatttctcagcaagttcttgcagtgttgctttgtcatcagctaaccaacgtgcacttacaatgtcttgtgaacgttcatcaagggtttttaacgcactgaataaacgagcatgagattgctcttgccattgctgctcttcgatatcgtcagcaaggtcagcactgccatctgttaaatattgtactggcgagtatgtgcttgtcggtgcgtcgtcattgtcgtcgcccgttaagtcaaagcccatatcttggccactcatacgtgattccatctcacgtacttctttttcgcttacacctagctcattagcaacagtgctaacctcagcttggttaaaccaacctaaacgctttttgtttttgcgtaggttgaagaataatttacgttgcgcttttgttgttgcaactttcacgatacgccagtttttcagtacgtactcatgaatttcagctttaatccaatgtactgcgaatgagactaagcgaacacctacacttgggtcgaaacgttttaccgctttcatcagaccgatgttaccttcctgaattaaatcagcttgcggtaagccataacctgaatagcttttcgcaatatgagcaacaaagcgtagatgcgacataatgagttgcttcgcagcttcaagatcaccttcttcctgaagacgtgtcgccaactgcttttctttctctgcatcaagcataggaatagtgctaaccgcttgaaggtagccgtccatacttgcgctctgttgacctgcagtaagtgccattgcgtataaatctttactcatttttcacctcagtgataaacatttgaaaccatcttagcactctttaagcgagagtgctaacttgaattaaaaacttttttaaagttcaaatcaagtggtttttttaagataattttattttactttaaggcgctgaataagcgatgaattctagctttttaggcgttttgaaaggtaaatagagtatccattcaaaacctaaataaacagcataacggctaaatatgacaaattaacgacagtaaaaagcgctaaaattatagcgctcaatacgactagctaaactttatcaggttctatttcttttatataacggtttacagataagtaagaaccaataaatcctaatccagttgcaagagcaactaaaatagcaaactcagccaaagttaatccgattaaatcaaagcttgtttcatatacgccagccacttcactcaccgcagctcccagccaccacatcattaaagcaacacaaataaaagagaacaaaccaccaataatgccgtaccaaatccctgtccataaaaatggcgcatgaataaaggtgttcgttgcgccaactaatttcatcacttgaatttcatctttcttatccataattgacaatcggatagtgttaccgatgatcaaagtgacggaagttaataatagtagagcaatggtaataacgctttcttttaataaacttaaaagtgcatttaagcgttcaagccaagcaatatcgagcttaccaaaatcaacttctctttcggcttccagcttttgcagtaattgcttggctgtattcggctgacggtatcgtgctgtaggcgtaacaatcacaacatctggcaacggattagcgtctaaatactcaagtgcttgaccaaatcctgatacttgtttgaattcagtgagggcatcaccttttgagataaactccactttatcaacttctgggtagagtgctaaacgcttaactaaagtttgcgtttgttgctctgtcatagtttctttaacaaacaatgagatctctgctgcatcttcaaagccactgcttacttgtgagacatttttaactactaaataaagtgtcgcagggagcgttaaacttaaccccaataccgcaatggtcattaacgaggcaagaggcgttcgccacatttcacccaaactgtgaataccttgacgaataaggttaagaataaagaagtacggcgctgctaaaagtgattttttttggcgctcattttggctaggccggcttttaaataataaactcatagtgccccctcagctaacgggtcttcgatcatacgaccatctttgagcgttaaactgcgatagcgcatgcgtgcaataagacctatatcgtgagtcgcaataagcactgtagtaccgtggttattaaaatcttcaaacaaacgcagaatatccatagaaagctcaggatctaagttacccgttggctcatcggcaagtagaatcgggggggagttgacgattgctctggctataccaacacgttgttgctcaccacccgatagtgtcgcaggattacatttggctttatcaagtaagcccactttatcaagcgcaccatttactcgttttgcaatttgtttatgatgcgtcccttcgattattaaaggcaaagcaacattatcaaacacagagtaacgttctaataagcggtgattctgaaagatgatccctatatcgcggcgcacataaggtatttgccgcgatttaacagcgtttaagtctacaccattaataagtacctgccctgccgatggtcgctccatcaaacttatgagctttagcaaggtacttttacctgcgccactgtgacccgttaaaaaggctaactcgccaggctttatatgaaaactaactttctcaagggcacggtggccacctgggtatgttttactgacttgctgaaaatttatcattttaattatcaatcatcttgcagcgaaaaagggagcacgctcccttttaattaattatgcatcgtcctcatcttggctgaatagtgcatcaatgaagtcattactattaaatgtacgtaaatcatcaatactctcaccaacaccaatgtaacgaattggaatattaaatttatctgcaacagcgaagatcacaccacctttagctgtaccatcaagcttagataaggtgatcccagttaaaccaacacattcattaaatagtttaacttggctaattgcattttgccctgtgccagcatcaatagttaacatgacttcatgtggcgcatctgggtcgatttttttcattacacgagcaattttttcaagctcttgcattaagttgtctttattttgcaagcgccctgctgtatcggcgattaacacatcaatgttacgtgcttttgcagcttgaaatgcatcaaataccactgacgcactgtctgcacctgtgtgctgggcaataaccggaatgctattacgctcgccccacacttgtagctgttcaaccgctgcagctcggaaagtatcaccagctgcaagcatcactgacttaccttcgttttggaactgcttagctaatttaccaatcgtggtggttttaccaacaccatttacacctaccattaagataacaaatggttttttgtcactaggaataaccagcggctgctcagccgttttgagcatgcttgccatttcttgcttcatcagctcgtaaagcgcatcaccgtcttttaattgcttacggtctgctgcatcagttaggttatcaatcaacttcattgttgtatcaacacctaaatcagcagtcagtaattgtgtttctagttcttcaaataactcatcatctattttcttaccactaaaaatagacgcaaagcctgaacctatattaacgcgagtttttaataggccttttttaaggcgtgcgaagaaaccttctttctttggtttttcagccgcagcttgagcaactttttcttgctctaaacgttccgcctctgcttgttcttcagcgattcgttgttgttctaaacgttccgcctctgcttgttctgcagcaattcgttcttgttctaagcgctccgcctctgcttgttctgcagcaattcgttcttgttctaaacgttccgcctctgcttgttctgcagcaattcgttcttgttctaaacgttccgcctctgcttgttctgcagcaattcgttcttgttctaaacgttccgcctctgcttgttctgcagcaattcgttcttgttctaaacgttccgcctctgcttgttctgcagcaattcgttcttgttctaagcgctcagcttccgccttttctgccgcgatacgttcttgctctaaacgttccgcctctgcttgttctgcagcaattcgttcttgttctaagcgctcagcttccgccttttctgccgcgatacgttcttgctctaaacgttccgcctctgcttgttctgcagcaattcgttcttgttctaggcgctccgcctctgccttttcagcagcgatgcgctcttgctctaaacgttcagcttgtgccttttcggcagcaatacgctcttgctctaaacgctctgcctgtgctttttcagcagcaatgcgctcttgctctaaacgttcagcatcgcgtctttcggcagcaatgcgttcttgctctgcacgttcagcatcgcgtttttctgctgcaagttgctcagcttcacgctgcgcctgttctgctgcagcacgttcttgctctaatttcattgctgcttcttgctcagcaagacgagcttgttgttcttggcgttgttgttctgccgcttgctgctcttgagctaaacgttccacctctgctttttcagcagcgatgcgctcttgctctaaacgttcagcctcagccttttcagcagcgatgcgctcttgctctaaacgttcagcctcggccttttcggcagcaatacgctcttgctctaaacgttcagcttctgctttttcggcagcaatacgctcttgctctaaacgttcagcttctgctttttcagcagcgatgcgctgttgttcttctaattgcttctggttatcagcctcagtcgctgtttgctctgctttttgtttttctgatttgccaaaaccaaaccaagacaagaatttacttttttttgccatacttgctaataaccacttataaaaatctgataaacttacatgaataatagtttggtggtagtccagctaatttagccaaactaaaacggataccatctatcgctagggtcgcaatactaacacttttagcgctttagaaaaatgacacgctagccattgcttacaatattatctgagcaagtggtcagttaccaatgattagtgagttaaatgagaaaaaaatcaacagctaaacgcccagttaaagccgctaacaataaagcagccaatggctttattcgtatcattagtggtcaattccgtggcagaaaactgcccgtaaaagatgtgcagggcttacgtccgaccacagatcgtattaaagagactgtatttaactggctaatgcaagatacacgtgacgcagccgtactcgattgctttgccggctctggagggcttggttttgaggctctttctcgttttgcagccagcgcggtatttttcgaactcgacaaaagcgcaacggcgcagttgaatagcaatatcgctactttgcaacttaaaaatgccacagtaaagcatggggagagcctaacactcttaaataataatgctgagaacgataaatttgatttggtttttgttgacccaccattccgtcagaatttagccgaaaaaagttgttttttgctcgaatcaaatcactggttaactgagcaagctcttatctatgtagaggttgaaagtgagcttagaaatttagacactcctgataactggctgcttttaaaagaaaaaactgcaggccaagtcatttgtagattgtatcaacgcgaaacaaattagcactgttttgccgactcagattctgttaatattatcctttacatgtggtgttgcttcggattacaataccgcaccatttttgaaccacttgatcgttattcgatcaacttgagcaacgctcattatttaggtaggtgaatttttaatgccagtaattaaagtaagagagaacgaaccgtttgacgtagcacttcgtcgcttcaagcgttcatgtgaaaaagcaggtatcctttcagaagttcgtcgtcgcgagcactatgaaaaaccaacagctgagcgtaagcgtaaaaaagctgctgcagtaaagcgtcacatgaagaagctttctcgcgataacgcacgtcgcgttaaattatactaatcagtatttggtcttgtataaatgagccttttattaacgctaaaagatgcgcaaaaagatgcgatgaaggcaaaagacaaagaacgtcttaagccaatccgcatggtacttgcagcaatcaagcaacgtgaaattgacgagcaaattacacttgatgacgacggtatcaccgctgtcttagtaaagcttgtaaaacaacgtcgcgattcttacacccagtacattgatgcgggtcgtgaagatttagctgaaattgaagccaatgagattaaagcacttgaagaattcttgcctcaacaattgagtgaagaagaaatcattgctcttattgactcggctattgctgatacaaatgcagcgggtatgcaagacatgggtaaggtaatgggagttatcaaaagcaaagctgaaggtcgtgccgatttaggtaagatttctggcttaatcaagcaacgattaactgcctaacccccacatacagatgtatgattcaagcaaaccgagcctagtgctcggtttcttgcttttagtctttcataaacaccgtatttgtgttcaaatcttattttaaaacgcatagatagcgcaggaaaaaacaacagctatggccggaaaaatccctagacaatttattgatgatttactcgctcgtacagatattgtggagctaattgattcaaaagttggcttaaaaaaagcgggaaaagactaccaagcatgttgtccttttcataacgagaagaccccttcttttactgtctcccaggataaacagttttatcactgctttggttgtggcgctaatggcaatgctatttcgtttgttatggaatacgacaaactagaatttgttgatgccattgaagagctagcgagtatgctcaatttagacgtgcctcgtgaacaaggtggcagctcaggtcctcaacgcactgccgaacaaaagcgctctgattacgatttaatgttacacgctgctcgcttttatcaacatcaattaaagcatcatgctaattctaaaatggtcatcgactatatcaaagggcgtggtttaagcggtgaaacagcgaaaaaattcatgattggttatgcgcctagtgaatgggaggcgttatgccagcaactaggccgtaacaaagaacaaaaagagcagttagtagagctgaagcttgcttctgaaaagtcgcctggtcgccaatttgactttttccgtgatcgactcatgtttcctattcgcgataaacgcggtcgggttatcgcctttggtggccgagtcatgcaagccgatcaagggcctaaatacctcaactcaccagaaacacgtatcttccataaaggctttgaactttatggtttatacgaagcaaaacaagcacataaaaaacttgaccatattttgattgttgaaggttatatggatgtggttgctttggctgagcaaggtatcgaatatgccgttgcagcacttggtacagcaacaaccgcagaacatatgcacactttatttagaaccacagataaagtgatttgttgttacgatggtgaccgtgctggtcgtgatgcagcatggcgtgcacttgagaatgcactaccttatcttggcgatggcaaatcattaaaatttgtatttttacctgacggtgaagacccagattcactagtacaaaaagaaggtaaagatgcctttgaagcaagattgagcgatgccgacgactttagtaaagtattatttaataagctcagccaagaagtggacctaactcaagatgcaggtaaagcaaagctactcagtgatgccttaccattaattgaaaaaatcccaagtgatttttatcaagaaaatattttggaacatttaggccgtttaattggtcgaacaagagaacaattaaacaaccgtgttaagactccaaagcaacagcatgctattgagcgtaaatttaaaataacgccaatgcgccaagctatcggaattttattgcagcatccaaatctcgcgacaagcattgcttatatgccagaacttgctgaaatgaaaattgccggtattgagttatttttacgcattcagcacttagcgcttgagcgacaaggtatcaccacggcacaaattttagaatcgttccgaggaagccaagagtacgatgcgttgattaaattagcgacttggcagcaccaaataaatgacgatcgtttagagacagtttttaaaaatacttttaaatttattgaagaccagtgtttaaattatcgactagagaccctattaataaaagacaagacccaaggcttaagcagcgaagaaaggctagaatgtctgttactaacacaagcgttaaaaggtagcaacagctagtcagaactgaataattctgttatactgtgctattcactgcgtctagttagttttcgtgtcgcttatttagtaagcgagctggcgcctgttgtatcaactttcagagtggaagaataaatctctatggatccaactcctcagtcacaattaaagcttctgattcaaaaaggtaaagagcaaggttatttaacttttgcagaagttaatgatcaccttccacaagacattatcgactcagatcaggtagaagatatcattagcatgattaatgacatgggtatcaaggttagcgaaaatgcgcctgatgctgatgaattaatgatgcaagaaacaacgacagacgaagacgcagcagaagccgcggccgctgcacttgcgactgtagaaaaagagatcggtcgaacaaccgaccctgtgcgcatgtatatgcgtgaaatgggtactgttgaactccttacacgtgaaggcgaaattgttatcgctaagcgtattgaagaaggtatcaaccaagttcagatttctgttgctgaatacccagaagcaattacttatctactagagcaatgggataagtttgaagccgaagaaatgcgtttaagcgacattatctctggtttctttgatcctaataatgaagacgaatcacaaatttctgctacacacatcggttcagagctaaacgaagagcagcttgacgacgaagacgacgaagctgacgatgaagacgacgatgacgatagcgatgatgatagcgatggtgatacgggtccagatcctgaagaagcacgtattcacttcgaaaacttacgtgagctttacaacaaagcacgtgatacgtttgaagcaaaaggccgtgctcacccagattcacaagcagctattgcagaaattggcgaactatttaaaacctttaagttagttcctaaacagtttgaccgcatggtaaacaacatgcgtgaaatgatggaccgcgttcgcgtacaagaacgtatcatcatgaaacaagctgtacaaattgcgaagttaccgaaaaagaacttcattaagcattttgctaacaacgaaacagatactagctggattgaccttgaaattgctgcaaacgagaaatactcggttgcacttgaagaagttaaaccagaaatcatccgttgcattagcaagttacgcgcaattgaagaaagcacgggtttaagtattgagcgaattaaagacatcaaccgtcgtatgagtattggtgaagcgaaagctcgccgtgcgaaaaaagaaatggttgaagcgaacttacgtcttgtaatctcgattgcgaaaaaatacaccaaccgtggtttacaattcttagaccttatccaagagggtaacattggtctaatgaaagcggttgataagttcgaataccgccgtggttataagttctcaacttatgcaacatggtggatccgtcaagcaattacacgttcgattgctgaccaagcacgtaccatccgtatccctgtgcacatgattgagacgatcaacaaactaaatcgtatctctcgtcaaatgctacaagagatgggtcgtgagccgagcccagaagaattagctgagcgtatgttaatgcctgaagataagatccgtaaggtacttaaaatcgcgaaagagccaatttcgatggaaacaccaatcggtgatgatgaagattcgcacttaggtgacttcattgaagataccacaatcgattcgcctattgattctgcaacaatggaatcattacgtggcgcaacaaacgatgtactagcgggcttaacagcacgtgaagctaaagtactacgtatgcgttttggtatcgatatgaacactgaccatacattagaagaagtaggtaaacagtttgacgtaacacgtgagcgtattcgtcaaatcgaagcgaaagcgttacgtaaattacgtcacccttctcgctcagacttactgaaaagcttcttagatgctaagtaacttagtatcgcattattaactaaaaggccgctgttgcggccttttttctattcgagagatattcatggcttggatccaaattcgcatcaacgcaaatgctgacaacgcagaattaatcagcgacttattaatggacactggcagcgcgtcagtaacttatgttgacgccaaagatacccctatttatgaacctaagcttggcactgttcaactatgggccgatacgactgtaattggtctttatgacgctaaccatgacatggacagcgtggtagaaactctaaaagctgaagcaacccttgccgataagctcgtttataaaatagaacagcttgaagataaagattgggaacgtgaatggatggataacttccaccctatccaatttggtgagcgcttatggatctgtccaagctggcgtgatattcccgatcctaatgctgttaatgtattactcgacccaggccttgcctttggtacagggacgcacgcaaccacggctctttgcctaaaatggcttgaaagccaagatttaacaggtaaaaccgtagtcgattttggttgtggatcgggtattttaggaatagccgcgatcaaacttggcgctgagcgtatgatcggcatcgatattgatcctcaagcacttgaagcaagccgtgataatgcgcagcgtaacggtgtcgcagataaacttgaagtctatttaccagaggatcaaccagagtttactgccgatatagtcgttgcaaatattttagctcagcctcttcgcgaactacatgaagtgatcttaggccttttaaaaccgaatggtaaaattgctatgtcaggtattttagaagagcaagctcagtctgtagcggacgtttatgccccgtttttagcacttgatgagattgctattgaaggtgaatggacccgagttagtggcacgaagaaggcttaaccctctctagagcattaactctaagctaataggtaaagccagtatttaacaggctttaccttatttttacagtcagcagtttctcgcctttgtacaagcaaaattatttttgttcaaataacaaacaaatcaacctactcgtcaaactgttatcaaaagtcaatacgaaaagggcaaaaaaaagtcacttttgttcaatttatagcctttgatttttgcaaaaaaaaccgtaaacttagcgccccttgaaaagaggccaattgaataacgtgcgtatcggttcataccaacttgagaacaacgtaattgtcgcgccaatggcaggcattacagacagaccatttagacaactttgccgtcgcttaggtgctggccttgctgtttctgaaatgctctcgtcaaacccgaaagtatggaaaaccgaaaaatcgatgaaccgtatggatcacagcggtgagtcgggaattcgctcggtgcaaatcgccggagccgatcctgagcttatggcgcaggcagcacaattcaatgtcagcaatggcgcacagatcatagatatcaatatggggtgcccagctaaaaaagtgaataagaaacttgcaggctctgccttattacagtttcctgaattagtggaagagatacttgatgcggtagtcaatgccgtagatgttcctgtcacattaaaaatccgtaccggatgggatcaggaaaaccgtaatggtgtcgagattgcgagaatcgctgaacgttatggcatagcatcattggccgtacatgggcgtacacgcgcatgtatgtataaaggtgaagctgagtacgccacaattaaggatattaaacgttcagtgtctatccctgtggttgccaatggtgatattacttcaccagaaaaagcaaagcaggttttggattatacgggtgcagatgccattatgattggtcgagccgcccaaggtcgcccttggatattcagggagatagaccactatttgcgaactggagaacatttgccagcacctgaaattgcagaggtgcgtagcattttgatggagcatttagacaatcttcatcagttttacggggagccaatgggagcgcgtatcgctcgaaagcatgtatcttggtatttgcaaacccatgacagtgacggtcagtttaggcgagtatttaatgcgttagataacccacaggcacaagtcgacgcattagaagaatactttaaaacactagcagctaactaagaaagaaagagacatataacgatgttcgaacaaaacgtgacttctccatttatcacaaaccctcatgtacagtcacacgagaaaccacagccgttgcgtgatgcagtgaaaaaagctgttcatcactacttaaagcaacttaatggtcaagacgttcaagacgtgtacgaccttgttctttctgagctagaagcaccattacttgaagaagtaatgacgtacacgcgtggtaaccaaactcgtgcagcaatcttactaggtatcaaccgtggtactttacgtaagaagcttaaaaaatacggcatgaactgatacccgtcttaatggactgatagtaagcctgcatattcattgtgctaataaacgcttactcccccattacaactggtataaaagttttgaataaaaagcaccttagggtgctttttttattgctgttaaaaactatgcaaaatcctcacgctttaaacatcgttttctcagcaatattcagttaaaataccgcctttctaagctagctcaaacattgaggtaatcaaaactacaatggatacacatcgtccaattcgtcgcgcactattaagtgtgtcagataaaaccggtatcgttgaatttgctcgcgctcttgaagctcaaggcgtagatattttatcaactggcggtacttgcaaattacttgctgataacggcattaaagtcactgaagtatctgaccatactggtcaccctgagatcatggatggtcgcgtaaaaacacttcatccaaaaattcacggcggcatcctagcgcgtcgcggtcaagatgaagacgtaatggaggatcacaacatctctgctatcgatatcgttgtagttaacttataccccttcgcaaacactgttgcgaaagaagactgcagcctagaagatgcgattgaaaacattgatattggtggtcctactatggttcgcgctgcggcgaaaaaccataaagatgtaactatcgtagtaaatgcaaaagattacgaccgtgtaatcagcgaaatgcaaaacaacaacggttcaacaacgtataaaacacgttttgaccttgcaattgcagcttacgagcacactgctcagtacgatggcatgattgcaaactacttcggcaaaatggttcctgattacacagaagaagctgctgaagagactaagttcccacgcactatcaacatgcagtttactaaaaagcaagatatgcgctacggtgaaaactcacaccaagacgccgctttttatgttgaaaacgacctaacagaagcatctgttgcaactgcggttcaactgcaaggtaaagcactttcttacaacaacattgctgacactgacgcagcattagaatgtgtaaaagaattcgatgtaccagcgtgtgttatcgtaaaacatgcaaacccttgtggtgtgtcaattggtgacaacattcttgaagcgtatgaccgtgcattcaaaactgaccctacatcagcatttggtggcatcatcgcattcaacaaagaacttgatgcagacacagctgaagcaattgtttctcgtcaattcgttgaagttatcattgcacctaaagtttctgaagccgctgcacagatcgtttctgcaaaacaaaacgtacgtttattagaatgtggtgaatggtctggtaatgcaacaggtcacgacatcaagcgtgttaatggcggtatcttggttcaagaccgcgacttaggtatggtaacgcagagcgatcttaaagttgtatctaagcgtcaaccaactgagcaagaattaaaagatttattattctgctggaaagtcgctaaattcgttaagtctaacgcgattgtgtatgcacgtgacggtatgactatcggtgttggtgcaggccaaatgagccgtgtttactcggcgaaaattgcaggtatcaaagccgctgacgaaaaccttgaagtgaaaggttctgttatggcatctgatgcattcttcccattccgtgacggcattgatgcagcagcagaggctggcatcacagcagttattcaaccaggtggttcaatgcgcgatgaggaagttatcgctgcagctgatgaagctggtatggcaatggtatttacaggtatgcgccatttccgtcactaataacacaaagggttaagcgaaaagtttagccctttttgtttgccacaaattcacgtattctgattactaataataatgacccatataatgaaggaatagatgatgaaatttgccgtaaaaacactgctagttgcaggccttgcactaacatcagcacaggctttaagccacagccatgaatcagcgcttacaagtgctgtacaatcaagcgaacgtgatgctaaaaatagcgctcgcgatcaataccgccacccagttgaaacacttgatttctttggctttaagccaaatatgacagtcgttgaaattgcaccaggcggtggttggtacagcgaaatccttgcgccagctgtaaaaggccatggtgtttactacgcggcacatttcccagcagattctgaagtaggttattaccaacgttcattagctggctttaagaaaaagatgagcgaagacgcgcgcttcagtgaagttaaactgactgaatttgcgccagtaacacatctagatattgcaccagcgggtagcgcagatcttgttttaacctttagaaatgttcataactggtacatgggtaaagataaagaaggcgcgttgagtgcatttaaagcattttacaaagcacttaagccgggcggcacattaggcgtagttgaacaccgccttcctgagtcgcgcagcgatgaagatcagaaatcatcaggttatatgaagcaaagctatgtaattgatattgcaaaacaagctggctttgaactagtggcaagcagtgacattaatgcaaaccctcttgatacagcagatcaccctaaaggggtgtggacactaccaccaagccttcgtttaggcgagcaagatgccgcgaagtataaagcgattggtgaaagtgatcgtatgacgctgaagtttaaaaaaccgctttaaataggattatacgccatgaatgtacttgtcatcggcagtggcggccgcgaacacgctcttgcgtttaaggctgcacaaaatagtaaagtaaacaccgttttcgtcgctccaggtaatgctggtactgcacttgagccaaaacttgaaaacgtagctatcaatgttgaagacctagctggtttagttacttttgcaaaagaaaacaacgttgaattaaccattgttggccctgaagtaccgctggttttaggtgtcgttgatacattccgtgaaaacggtctggctatcttcggcccaacggctggtgcagcacagttagaaggctctaagtcgttcaccaaagacttcttagcacgccacgatattccaacagctgattaccaaacgtttgaacaaatcgaacctgcgcttgcttacctgaaagaaaaaggtgcgccaattgttgttaaagctgacggcttagcagcaggtaaaggcgttatcgttgcgatgactgagcttgaagctgaagaagctattcgcgatatgctagcaggcaacagcttcggtgaagcgggtagccgtgtagttatcgaagagttcttagaaggtgaagaagcctctttcatcgtcatggttgatggaaagaacgtactgccatttgcaaccagccaagaccacaaacgcgcttacaatggtgaccaaggtccgaatactggcggcatgggcgcatactcaccggcaccagtagtgactgatgaaattcaccaacgcattatgaacgaagtgatcaacccaacggttgaaggtatggcaaaagaaggccacccatacactggtttcttatatgcaggtttaatgatcaccgctgatggcacgccaaaagtgattgaatacaactgtcgttttggtgacccagaaacacagcctatgatgcttcgtcttaagtctgatcttgttgagctaatcgaagcagctaaccgtgaagagctagataaaacagatatcgagttcgacccgcgcgcagctgtaggtgttgtattagcagctaaaggctaccctgatagctacccgaaaggtgacactatcaacggcttacaagttacttaccctgaaggtgagaaagtattccacgcaggtactaagcaagacggtgataacgtagtaacggctggcggtcgtgttctttgtgcaacggcacttggtaacactgtaactgaagcgcaacaacgtgcctataaactcgttgatcaaatcagctgggaaggcatggaatatcgtactgatatcgcttaccgcgctattgctcgcgaacaaaagtaagtaagttaaaacttatttctcttaaaagcgcagtttatctgcgcttttttaatgctacactattaagaataattaactagataaagaacgcgttttgaataataaagcattgaaatataattttgtttctttttttattcttgctactttgttttttatcatcgccaatttgtgcgcgcatctggccagtccaactcgctatacaattgataagacagcgccagtgtattctcaaatggcttatcgtattgaccaaagcaaatctctcacccttaaccaatttcttgcagagccagaacaacttataaaaaagccattctcgcaaattgagtggcatttaggcgctcaagattactggttaaaacttgacttagaaaaccgtcaaacgaagccgattgatctcattattcactttgataaccctatggttgattacctcactgtttaccgtgtaaacacacaacaacagcttattaaaaaaacagtgttaggcgataaagtacctgatctaagcctatttaaatacagtaccccacatacgtctttcactcttaatggtaatgagcaaacatccatcatcattaaagttgataccgtggggatcagtaaaacgcctattaacatctatggtaaaaatgaatttcaagatttagttcgcgcacaagtgggtgtatggggaatttttattggtgtgctgatcatggctgcgctctataacctagtgttattttttggcatacgagatcgtgtatacctaatttacattggctatattatttcggcgctgttattaatgggctcagtgctcggctttggcttttatctctggccattatcgtggcagttatttttaaataaacaggtggtatttagtaactacgctattgccttttttaccgttgctttttgcaccatgtttttacgctaccacaaagacaattgccgcttatataaacttagtctcagctttttagccctactgttcagcttaagcttaattagcttttttatgctcgaataccactcatcaaaaattttctttgccattatggtgccgctgtacattttatgtatttgcatgatttataaaaaattagtgagtggctttcggtgggcaaaattttatgtgatgtcatgggtccctctgattgttggcgcagcaattcaaccgttagaacttaccggctttatcccttatagctttaccgttaggcatatatttttagtcgctattttatgcgagattgtattaatggctatggctctagcagatagagtgcgctatcaaagagagaaagctctctatcacgcaactcatactcaacaaacacaacttctaaatcaggccatgctcaaacaagcttatatggttctgagaaaacaacaaagatcagctaatctgtgccttataaagatagagcaattcactgcactgatgaatattctaaattcaacacaaagcagtcatatcatcatcacagttgctgattcactagaacgtcaagtaagtaaacataggcaattcattaaccttgaatcagccctcgataacagccctaaaatagcagatttaggaaacggaatactggcatttatctctacaaagattcagccaccagaggagctctatgcagagcttaacgacttatcgaaacagttgccaaaacaatacagcattttgggtcttgatctacaacttaactatcgctgcagtgtcgcagaaccgattgctgacgacggatttgatgcctggttacagcgtggttacttaagcttgtctcaacgacctcaatataatattgaacatgcaaaacctcatgtagatatgaatctaagtttagctgctgcactgcaacacgctattcgaaacaataatttagctatctacctgcaaccaattatcaacttaaatacaggcaaagtggcaggcgcagaagctttattacgctggccttgcgccgataaagagatccatattgagcagctgatcctattagctgagcgcacagggctaataaacgagcttaccttatgggtaattgatcaagcctgtcaaagtgttgcaagccttaatcagcatggttatcgtgaccatacaatcagtgttaatttaagtgccaaaaatctcaccattccaaagcttattgaaaaagttgaaaataccatcatgaagcatggcattatggccagccaattaaagtttgagcttaccgagttcgcgctaattaaaaaccataatgaaatggtatctttcatcaatgagctcaataaactaggtagccaagtggttttagatgactttggtacaggttactcatcgctcaattatctggttaattattcatttagcactatcaaggtagataaatcatttacccttgatttaacaactaacgacaacaaccaagttatcgtgaaaacagccattgatatggcccataacctcgatatgaatatcaccattgaaggcatagaagatcaagaaacagaacagatgcttataaaaatgggcgcagatcaaggccaaggctattattacagcaaagcgataccattaagtgagtatctaacgtttattgccacacaatttaaatagaccatgttacacttgcctcttttaacatctttaggggccaagtgaagatgcaaggtacgctcagaaaattaaagtcgaccctcacctctccagtcgaatatcaattacctattggtgatgagctagtttcattaaatgactatattggtaagccactaacacttacgtttacgggcaatattttttgttgtaactgtgggaaaaaaaccaaaaagagttactcacaaggacactgctttgtatgtatgcgcaaattagctagctgtgatatgtgtattatgaagcctgaaacctgccacttcgataaaggtacctgccgcgagccacaatggggcgaagaaaactgtatgatcccacactatgtatacttagcgaatacatcagggttaaaggtagggattactcgccatacacaaattccaacgcgttggattgaccaaggtgcaacacaagcactgcctatttttaaagtacaaactcgcttgcaatcaggattagttgaagttgcactagccaagtttattgctgataaaacgaattggcgaaacatgctaaaaggcccatcagaagcaattgatttgaaagccgctgccaaagagcttatcccacaaattgatgaaaaactcagtgaactcgctgagctatttggggccacagccattgaaaaactagatgaagatgttgttgagctagagtatccagtgagtgaataccctagcaaaatcagctctttcaattttgataaagcgccagaagtatcgggcattttaaaaggtattaaaggccagtacttaatttttgatactggcgtcattaatattcgtaagtttacttcttacgaaattagcctagcttaggcacttttttcggtattgaggtaaaaggcataccattgctgcttcgtaattgggcggcaatagtaataaccttgaatggtatcgcagttaagtgaacgtaagtaatttaactgctctattttctcaaccccttctgcaaccacatgcatattaaggcttttagctaatgtgacgattgccgttacaatttcactattgccgtattcatcaggcactttagcgataaaactggcatcaatttttagtgtgtcgattggcaatttagtcaaatagctaagcgcagagtaacccgtaccaaagtcatcaagagttatatgcacaccgagttttttcagtgccatgagttcttgtttcgcttcactaaagtgactaataaaacagctttctgtgagctctatctctaactgataggggttaacctcatagtgctcaagtaaccgctctacattcgacgcaagttgcccctgacgtaaatgattcgccgaaatattaatggctaagcgccctgcttcaatgccttgttgctgccaattaactaactctttgcaagcctcttctatcacccacaagtctagctttacaataagacctaactcttcagccaaaggaataaactttgctggagaaatcacccctaaacttggttcgtgccaacgtaggagtgcttctacccctaaaattttgcctgaagttaactgctgcttaggttggaaatacagctcaaactcatcactctcaattgcattttgtaaccggctcatcattgcaagtctctctaaagagcgcgcattcatcgcaggtttgaataattgaaatgaattacgaccaacttctttagcacggtacatcgcaatatcggcgtgcttcagcaaggtagcactatccacaccatcatcagggtaaaccgctgcgccaatcgatgccgtaatggccacaacatgctcgttaatagccaaaggcatactaacttgttgaagtacttgctcagcaaagtttagcaagtcttcaatacgatttacttcacatagtaaaacaaactcatcaccacctaaccgcgccaaggtatctccatccggaaggatcgataaaattcgctcagcaacttgctcaagcaagttatcaccagcatcgtgccctaaactatcattcacttctttaaagcgatctaagtcaataaacatcaccgccagtaggtcatgatttcgttttgcagcactcaatgcaattgataacctatcatgaaacaaacgccgattaggcagaccagtcagctcatcgtaataggcaagttgggcaatcttttcttcggcacgtttgcgctctgtaatatcactaaaaatagcggcatagagcacttcgtcaaaattgggatctttgatctgaatgatcgttagccactcaacatactcttcgccatcttttctacgattacagatctctccttgccaaaccccttcgtattcaatggcatgccacattttttgataaaaggaacggctatgttttgctgaacttaaaatgttgggccgcttgccaataacttcatgctcagcaaagccagtcagtttagtaaaagcagggttaacttgaataatagtgccgtctttacgggttaacataatgccatcgagtgaggcatcaataattttatttgcaagaaaaaggtttcgctgtgatttttgcaaagcaatgtcacgctgttcaatcgctcgctcaagctcgcagcaataagccgactcaatctctgttattaaatcagcaaatgaaatcactccacaaatagcggtgtctctgaccaccaaatgacgcacattgcgttctgtcatgactcgataagcatcaaaaagactacttttattatcaatttcaataagtggataactcgcgtattcccagcacgggtttaaccactctgtttgtaaaatcaactcaacgatgtcacgctgggtaatgatgccataaatttcaagtgattgattataaaccaatacactttcaaggtgtttcatgcgcatcagttcaaccactttctcaataggcgtatcggcatcaaccacttctaattctgtacaatactgctcatgaatgggcctaaactgcaaatagtggtctaaaccttggttgtgaacgatatcagaaaggttcaacatccctaaaggctggctattatcatcaattaccaataaatgacgaataccgtgttgttgaaaacgtaatgttgcatcacttactggatactgacttggcactgagataaccggtgccgacatcacttcgtgaattgcaagattcttgtaagtgggattagttatatctacctttaagcaatcagcttcagtccagataccaacaatcgacttttcatgtttaataaaaatggcggttacaccatgcacatgcatcaaccttacggcatcaaccaaaggcgtatgcgcaggacatgaaacgagcttttgcgaaaatacatcgcacaccttttgatgtcgtcttggttgattcataggtaaataatcctagttcttgcatggactgacaattataatcatttcatccttggcaactttgacgcaggacaataaatgcacacatcttttcctaagataattttttcatctaatgaattggcattagttgaagatgaagccgatatagaaagctttatttatggtttaagtgaagagcagcaacaagaagcgaggatacttttagcaacagggcactatgtcaacttgcagggagaaagtgttaaagcgttaactgacgtagagcttgctaataaagtgactgagcatctagcacaagaaggtgtgtgctgtttaagtaaagtaactaggcttactgcaacgcaagcctttgcgatgctggcagattaaggtgcgtccaccagcgctttaatatgcgccacggcacttcgaccaagggctgataaggcatagcccccctctaaaaacgaaacaattcccttgcattcttgctgctgacaaaactcagcaagttgcgtagttagccatgcgtaatcgtcttcaacaaatttgaggcttgccatgtcatcttctaagtgagcatcaaaaccggcgctaataaacaacagttcaggtttaaaatcattaagttttggtagccactgctcaaggtaaacagctttaagatcattaccatcactggctatcggcagcggcgaattaactaaagtcgcattattttcaacggcagtattaggataaaacggatgttgaaacaaagagcaaaacaacacattgtcgtcatctaaaaagatatcttgggtaccattaccgtggtgtacatcaaaatccaaaatagcaatgcgcttaacgcctttgctttgcgcgtatttcaccgcaatggctagattattaaaaacgcaaaaccctgcagaggtgctgcggtttgcatgatggcctggcggtctaacggagcaaaaagccgcgtcgagattatcagcaagaatttcatcaaccgctaataatccagcgcctacagcgcgttcaattgctttcattgaatctgggcataaccaagtatcgccgtctaattcagcgagcccttcatcaggaatagtctgctcgacgtggttaacgagagattcgtcatgagcacgtaaaaaatcgtctcgggtagctttaggagcttgtaagtgagtaattgcaacatcaacaccactggcgagtaaacggtctgtgatcacatctaagcgtgctggacattcagggtgatcgtcaatcattttatgcttacggcaaaatgggtgagttattacagccgttctcataatacactccttggattattttcccccagtataacaaagccacctgatggtggctttgcgacttttgtttactttttagcgtgtaactctagatttctaaaatcgaaactaaagtcagttacttcagtagagacagcccgcattttcgcactactcacacggttatctgggctcatttgaaactcaataaaggcatcggcctcaagtaacttttcatcccacttaacaataaaggtattgccggtgtaatgctcaagctggcctttcaaacgctttgtatgagtaaaatcaatacgtaactgaccatttaattcttcaatgaccacatcaccataccagttgtcatgtagtgtgcctgtgtagttgatgtttggcagttttggttgataatctgctggcgtttctggttttgcatttgcgtacgctttttctttgttttcgaaatgctttttagccaactcttcgacccaatctttgtcttcaagatctaacgcatcttcgagcacttcataggtcaccgcagatagcgcactaaatgcttgctggttacttagaataacaataccaaggtttttctctggtagtagcgtcacttgagacaccatgcctaagatgccgccaccgtgacccagttttttaataccgtgaaagtcttcaatgctccagcctaaaccataacctctaaattgttgatgataagcttcgtaagcgctttttgatgccagtgaggtaatgtgcgggtgccacatttgttgttgctgcttttcagtgaataactgctgaccatttggcattttaccatgcgcaagctgcgtgcgtagccattggctcatatcgctcacactagaagcgattgcacctgcaccacggaaatcttcaaggtagttcacaaaaaatggatgtaattgaccatccattggaatatggcccgtcgcccagtttttattactactaggaatgcgtgaaaaacctgcacgtgagtttttcatatcgagtggctcgagaatatttttctcaatgtaatcattccagctcataccagatacacgcgcaaccacttcacctgcggttacaaacatcaggttgttatacgcgtatttactacgaaaactactcgccggttttaaatacttaaggcccgcaataatttcatcaattgatttgtcagtatcaggccaaatcattaaatcgccttgccctaaacctaatccgctgcgatggcttaataaatcgcgaatggtcatttcacgggttacataagggtcatataaacgaaactcaggtaagtgatcgattactttgtcatcccagctgagcttaccttcatcaatcaatttagctaacgctgcggcagtaaatgctttggtgtttgacgcgataccaaataaggtatctttattcacttttttaccagtatcaaggtttgcgataccaaagccttttgctaacacgactttatcattttcaacaatcgccactgccatacccggcacatcaaaacgcgccattgaggtttcgataacgtcttctatttttttagtatcaatgtcggcataactgtaaaatgaacagcttgataacaatgccgctgcaacggctaatttacggaatatcataatgtcccttggtgatttttattgttgtgaatagcgaattctctcgctgcccgggttttatctggatcatcgcaactttgtcttgcgagtattgcttcactgtaatgatttggtacgcccgcttcaagcgctccgcgatgaacatgctgaagataccagtcgaatggtaaaagtgagtcatcaacggtattggcaatgtagcaatgagctgatacacgctcgccatcaataagctcaacggtgatatctatacagtcataacgcgggccttcaatttcatcaagaatcgacttttccatctcattgagctgatataccacgccatacaccaaggcatcagtattatctgtttcgcgaatactacactttgcagagccgtcggtactgaccatatcaaacgtaagctcatagccttttaaaatagctgtgccaatacgctttgcttctggaagccttgcaagcaaacggctcgaagacatatttgacccaaatgaaaagttataaatagtcatagtcacctcacacaacaacgcgaatagctaacgcaataagcacaatacctatgcctctatcaaaccagtacccgctttttaagaaaaatgaacgaaccgatgcttttgatagcaccaaagataaaaatgaaaaccatagccaagttgcaatagccatatataagccataaccagcttgtactaaaacgggtgtctcagggctaattacgagggtaaataacgacataaaaaacagggttgctttagggttaagtgcattggtaaaaaacccgcgtcgaaatgctttatacaccgattctggctcagcctgagcaaggggttgctgtttactatcgctcggcttggcactgcgtaaagcttgtacgcctaagtaagccagataagcccccgctacgtattttaaagccataaataagctaggcgactgcgataaaattaacgctacacctaatacacagtaggcaatatgcaacaaaatagctgcgccaacaccagcgctagtccaaagtgcatttttacgtccttgctgaatactttgcttaagcactatcgcaaagtcaggtccaggactggctaccgcaaaaaaatgggcaatggcaatcaataaaaactcatctagatactgcacaactacttaccctatcgctttttgatctaatgccaataacataggattagcactgtcatgcatgagagctttaatttgtttttgcgcttttttatattggctgcgaagatgtggctttaaaaacgtcttcgactgactgtcccctttaaaatgcgtaaccagcgcatgcataaacagcgtttgtggctcagtcagcgccgcttgacgattagcatatgggttataaccgcagccacaacctcctttaaattgatacaccgtattgctcatcatcaccccaaagcctaaataacatgccaacgcatcacttgcctgcggtaaatactctttaccgccgggtggtaacacacccacatggtgaatcaaaatcgtcgctaatgtccctgcaaaactagcgactaaatcttgtggctgatttatttggttcgggttatatgaaatattcacgtgatgatttgcaggaacgatcaactgtacattttcgccgcgtattgcgtctaaaaattcgaagtgtggaaacacctgaggtgtcagcccagaaggtgcaaccaagttaattggccacgcctgcatacccgcataatcaaccacccgactaaataccttttcagccatttcggctacactcgataccctatcaggaaagaactgcccattaggtaaaatgattttcgtatgctttaaaaaataatcactatcaaagtgctcaacagcccacaaaaaggtatcaattagccactgctgctcttgctcatcaataaggggacttgatttaaataacgctaacataaattactcttgtgattgtgcccattgccatgcatcagtgttatacaaaggcactgttgataaagcatgatgatgactgccacttgattcttttgttgaatacgacaaatataaaagtgtacgtgttggcgcatcataaatacggcgcacttttaacgacttaaataaaatactttttgatgatttaaaaaccacctcacccgatttactacgatctattttttgtaattgttccgctgtaataggccctgtttgacgacaggcaatagacatatcagaaggatcagcaaagtctaggttggcttcaatgtggctgatgtgacaggttacaccgctaataattgggtcttgttgtgatactactttaatgtcttttgtagtaaataaccctaaacttaccgaagcagcatcatccgagcagccactcaacaaaataagtgacgcagtaagtccggctaattttagtaacttcatcctagtgttccttattaaaaagcgatagttgtccgtttacaacgatttgcttgctatgtttcaatactatctcaaaatatcttcaacaacgagcacctaaacaatgaaaaaatcgcttggtttactgtgtttcatgttcttaagtagtacagctcaagctggctactcaattagcgccggtttcggcaaaaactttactaactcggtgcaaaccgaagaaaatctaaagattgagcttgaggatgacagccattttactgtcagcttcgatagaaccattgataatgctcgctatggcttcttctattcggcaaccgagcttgatatgaaagaccaaaccaacaagcaagtcgagatgcaatacctgctatttcaaagtgccatagaagtgccactggctaatcgtgtggttagctttgttggcgcccaaattggcgcaaaccacgtaagcactgactttgccgactcagatacgtattttacctcgggcctttatgcaggcgtcgattatttatttactgaacaagcacgggtttatgttgaaactcgctggctggcaactattgtaaataatgcaagtaacgtatcgtgcactttaccaacatcagaagacaatcaatgtctatggcactttgatggtgatgtgttaaaccaatttcagacaaacatcggttttagttaccgcttttaaggaagaccccatgccgcacattgttatagaacactcagaagatttgccaattctgccacaagtgttagttgaaaaagttcaccaagccgtttttgactctggcttatttgagctttcgaccataaagactcgtgcaattgcttatcagcattacgaattaggtgaaggcaaagatggctttattcacatcggcgcatcaattatggcaggcagaaccatagagcaaaagcaaatgctcagtgagcaattactaagttgcttaagaacatactgtcgccgctcctatagcctaagcgttaatatttacgatatggatgctgatatctaccgtaagtgttaattactttggtaaataggctgcgggtaagcgcttgatttctatctcaggcgataaatacgcagtgtaaaccagccaacgctcattgggtatgtaggtcaggcccgatgagcgactataagcacgctctggtaaagcaattaaatcatgatgctgcttacttgctaagtcatagtagctaatacggtaatcacctaagcgttctttatagtaataaatacgtccctcatgataagcattctttgccactagcaaccaggcataactgcgcgctaatttaatatcattcaccagcatttcttctacacccgtatcatgatgtttaatccaaatagcatggcgcgagttagtaaataaaatatcacctgtttgtgtttcaacaccatactgcgctggcacttcaactgctttaccgaagctttttgctgttaagtcataacggtaaagatagtctccatcagagactaaaatatgctggctatcagcactaaacttgggtttaacagcatgactaaatggcagtttgatttgttggctttgctctactttgaaatcataaaaatataagtgggtactgccattgtcatacaatgaaaacaaaatatagcgtccatcggctgaccaggttggatcacgaacttcccccgtgttatgtgcaaagtcagtaagctgctttcgcgagctgctatcggggttaacaatccaaagctgtgaactgcccgattcattcgacacatacagcagtttgttttgctgctgattatattctgggaatagcgagctaaaattggtcgataacatagaaaacggtgaactggccacttgctcgtctattttcagacgcgtgatcaccttatctaaatcccactgatgataataaacactgccatcgctactgtagttaggtgagctcatgccagcgatttgcgtgttgattagggtttgattatcaatatcgtagaagtagccataacgtttgccaccctcaactgcactaaacgccaattgcgctttagatggatgccaatctacaccatgaatatcaacaaaatcatgagttaggcgttggctttgccctgtttttacatcaattaaaaacagcgctttttggttgtttttaacattacgcgtaaccacaactcgctgtgcatctggcgaaaacgacacagactcatacacagtttcgcagtcatcattacaaggaataaacgtttcacttgtttgttttgcctgtaaatcgagcagtttgatacgagtgacatagtcacctgattgcgtggtgtgatcagcaatatagactaaggttttaccatcactactaatatcgagatcagtcggatatttattactacactcccctaatacgacactggtggcattaatcaaagacaacttaacaatttcacagacatcagaccccatgcggtaatagtacaaagtatttgcatctgggctgaacacagagcgcccttctgtataaggagagtcagttagttgcttggctggatgctcaggaaaatgtaaatcgcgtaaatataagttatttggtttaccaagttgtcgccatgaatacaccaaatagtgctgatcatcagaaattgaagggtaaatctcgcgacctgggcttgcagtaacactttcgatgctattaagcggtaacacaaagcttgacttagtttgcgttgcaggcgaagagaacagccaatacattaccacaagactaattacacacattgccacaaacagctgacgaatttgcgcagtagtgatgctaatacccactgacttttctttatcagctgtatctattggctcaggctttaacaaaacacgatagcccgttttacgtagtgtctctatgtaagtttgttctgggtcgagttctttaaatgcttttcgtagatgccaaatagcatttgttaaggctttttcaccaacataaaagttaccatcccacacattattaataagctcttcgcgtgtgatgggctcaggataccgtgcgactaaacaccctaatagttcaacaaacttaggctgtagtatctgttcaataccattacagttaagtttgttttcgagtgggttaataacacaagaacccagccgatacgcgcgattagatgtttccattaactctaaataaaaccccattttagaagtacagcagtataaagccctatcaatttatcttaaaagcgtttctttcaccagctttaacgttgcaaaacagttaacaatgaccatttcttaagccgctgattttaaatgaatagatattcagtagatataaaatagagacataaacgagccacctaagattgtagttaagttcacatttctataaatatttttacgtcaataccgaccagccagagtgttgctcactgtaaattttaactgcccttaaaaagagcatcactctggttctaaaaattaaaaataaaacaactaggaacacctgtgagaaatctactaaccaaaccctgtgctattgcacttgctgttgccagtggttttagccaacatgcatttgccaatgaagctgagattgcccgcaccgccaacaccaccccaacagctaatgaacaaactgaagagcctgaaaaaattgttgtaacgggttcgcgtattaagcgtgatagcttttcaattcctacaccactggtcacaatggaccgtgaagccattgccgataccggtttaaccaatttatcagatattcttgttgataacatgccagctctaagtgagagcataggtaacaccaccagccaatcaagtgtttcagcaacggggttatctaccgtcgaactacgagatttaggtgctaaccgcactctaacactgattgatggccgtcgtgttgtatcaaatagctacagcggcaactatgttagtttaaataccattccaagcggcatggtagagcgcgtggagataatcagtggcggtgcatcggcaacctatggtgctgatgccgtagcaggtgtggtgaatattatcacccaatcaaaaaaagaaggctttgattttaaagcgaacacaggtgaaaccactgatggcggcggtaaagaatttacccttgatttaaactacggtacctcgtttgctaatgagcgtggctacgcttatttcagtgccaactgggaccgtgattttggtatgactttttacgatcgtaaacgcgcacaaattgaagatagttacgattacgatccagatcgcatgtgtaatgtaatgcaaacagcagatggcgatcaatgtatgcgtgacatcacacaagctgactgggttagcaaaagtgatggtattccgggcggtgtattcttagaaaacagccgcaacgacacgcagttttggtatgacggtcaaactctacgtgatgactggaaaggcaatgaagaaatttacggtattaactcaaatcaatacgtcatgcttgatgttccaagcgataacgtgtctgcggcagttaaaattgattatgacttaactgacgatgtgatgttttacgcacaagttcaatacagcgaaagtggctcgtttaacaataagtcgcctgaagatgaatacgaaggtgcgtatgtaccacgttacgaccctactactggcgagccccttgcagatgtagcaccgggctatatcccaatcgacaacccgtatgtgccgcaagaaatcctcgatgccaacccatataaagatcgcatttattgggatcgccgcttcagcgaagttggtaatatcagcacagataatacccgtaaaacgattcgtagctgggcaggtctccaaggcacattatttaacgatgagtgggactgggatctatctgcaagttatggtcgttttacccagcaccaaattcgcagcaatgaattaaataccgtaaaacttaatcaagctttgcaagctgaacagttagcggatggcaccattcaatgtattgatgaagcagctcgtgctgaaggctgtgtgccaattaacttatttggtgagggatctatcaccgaagagatggccgcttggatccgcactaacccaattattgataccgaaataaagcaatacggtgtggttggctacataacgggtgatttatttgaattaccagcaggctcagtatccgcagtatttggtggcgaataccgtaaagacagccaagacttatcaaccagcgatgacatgaaagctggcggtattacctttaactatgtaccaaatttttatggtgaagttgaagtctacgaagcctttgcagagcttgcgatcccactgttaaaagatgctcctttagcaaaaagcttaagcgcagaaacttcattacgtttagctaactacagcatggaaaacgtcaacaccgttgccagctacaagctaggtgtattttgggagccaatcgaaggctatgcatttagagcaaactacgcccgtgctcaacgtgcgccaacgatcaccgagcttatgtcacctccacgtggcgattacgacagctatgatgatatttgtgatggtttaacggcaacatcgactaaaccaggtcacgataactgccgtaaggagcctacattagctgcacaacttgcggctgatcctaactttgagtttagcgatgagaacaacagctattcaccgggtactggtaacgaaaacctaaaagaagaaaccgctgatacctatacctttggggttacagtggctccaacctttttagaaaactttaatcttgccgttgattactatgatatcgccattgttgatgcgatttcgcagatcagtaatgaaaacatcatgcgtgagtgctacaactcagaagcagcatggggcgaagacaacgtattttgtaatgacattacccgtaacagcgaaggtaatattattaaaatcttacaacgccaatataacctcgatgagctaacagcgcgcggttatgacgtggttgcacagtacaaattagacttagataacctgggtcagttgtcgtttaaactagattacaaccatgtaatcgaaaactcgcaaacttatgaaggccttgatggcagcttggtaaccagtcactacgcaggttatggcagcagcaaagataaagcatcaatgtcagttacatggcgtaacgataacttacgtattcgctggcgcacaaattacttaggctcgtttaaagcaagccagagtcttgaagaagactatcaagagtatattgccgaaaacgatgcccgctgtgaggctggtgaagatacctgtatcagtaacccagaaaaacttgcttatcaagattatggctcgttcttaaagcacagcctttcagcgtcttacaccatgtcacttggtgaacagagccaactgcgcgtattcggtggtgtaaataacgtgtttgataataaaggtgacttttatccatatggccgtggtaactactatagcgcatacggcggtggtgctggtcgctacgtgtatgtaggtgctcaatatagcttttaaccgtttcatatgaagatccccagctaggctgacaacaaaggcgcatttaaaatgcgccttttatcttttccaactttgcatctcaactagtcgagactcggtacgtgcatactcaaatgccagcttttgtccttgatataaatcacttataccgacctcggccgagatcaccagtaatcggttgcgatcataaaactcatcaactaaagcaataaagcgccgtgcttcatcatctaaaaagtgttcttgtaaatcctgtttttctcgctgataactatcttcaatgccatgcacaatttgttttcccgttgctccacgccccattaccggcacattgagtaaataaacacgctgaaaacactctgccaaataaatgtaatccgcggtgcttctgggtcctgagcaaagtgtcataaaatcaaacataatggcgtcttgagcttgcattacacagctaagcttgcgatggcaaacctctatcgttgtttgcctctgtattgcttgctcttgttttaaaaagcgctctgttagcgcctctttattatcaataaagtaatgttcggtttgtttaccaaagcgaaagcgatgatctgtatggccttcaacactcagaatatggcaatgattatttaataaatcgatagtgggtaaaaagcgagctcgctgtaaaccattacgatacaactgttccggttggcagttcgacgttgccactaacacgacttgctgcgcaaacaaggctttaaataagccacctaagatcatggcatcgccaatatcagacacaaaaaactcatcaaaacaaatcaagcgaatgtgctctgcccattctttagcaatcacatttagcggatttttttgcccttgcaactcacttaaacgctcatgcacttgcttcataaaatggtgaaaatgcaaacggattttaccctcaatgctaactcgttgataaaatatatccattagcattgatttaccgcgaccaacagagccatacaaatacacacctttaatcggctttgctctttgccaccaatgacttggcgtagttagcaattgtgataactgatccagtgcggttatagctgctctttgagcgacatcctcagttaagttgccattcgctatctctgtttggtagtgctgtaatatttgtccttgctgtactgtcataggtaactagtatccgctatactcgccgccattgtagctgactaaaaatgtgatcccaatgaaatttccatgccgtttagataaatttattagccatattgctgagttaccgcgcagtaagaccagagctggtattaaacgcaaatacgccactgttaatggtgaggtgattacctcattcgatttgtctgtaacacaagatgatgatattcgctggcaaggtgagccactagtatttttaggtaaacgctactacatgctacataagcctgcaggttatgtatgcgctaataaagatgaccttcaccctactgtatttgatttaatcgatgagccaaacatgagcgactttcatgttgcaggtcgattagatatcgataccacaggtttagtgctgatcactaatgacggcgactggtcgcataaaattactgcgccaaagcataacaaattcaaaacgtatttagttgaaactcaagaacctattgaagacgaggcaattgcggcgttagagcaaggggtgcaattgcacaacgaaaaagagctaactcgccctgctattgttgaaaaacttgcaagctacagcttacgcctttctatttgcgaaggtaaataccatcaagttaagcgaatgcttgccgctgtaggtaataaagttgttgaattacatcgtgaaaaaatagctgacatcaccctcgacgaaagccttgcaagcggtgaatatcgagcgcttacagaagccgaactgaagctctaaataggtacttgagcaaatatcatgataacgctgtcatttttacttaataaaataatacaaacgtggtagaagtaataaggggaaataataaaggaggctgactgtgttatcaggattagctttaaaaacaaaaatcaccttatttgctatcgctatgtttattgcgttatctgcgatagctttacttggcttacaatctttacgccatgccagcgaaagcgacaacatcgcgcgtatcaaccagctcatgaagagcaccaccaatattgttgagcaatttgagttgatggttaaaaacaatcaactcgaagaagcacaagcaaaacaactcgctattcaggtgcttcgtgaaaataaataccacgaatcagaatatgtttatgttgtcgacaacaacttagattttgttgcgactcctcacgaccctgaactgcacggcaccagctttaacgattttaaagatgccagtggcaacagcatcggccgtatggtcgaaaacctcgtgggtaatacaaccaataaaatcatcacctatcactgggattcagtgcgagatggagaaaccgttgatttaacctctgtagtacaaaaaacaccgctgtttggctggtatgttggtacaggcattagcgccaaggaagttgatgaacgttattggaataccgcaaagtggttgctgggtttatcaatgctcatcactattgcacttacttttgctattgctcgctttggctcatcactcaccaatgccttaggcggcgaaattgacgaagtaattggtattgttaaaaacgtttctcgcggcaacttaaactcacatattcgccaagatgccccacctgaaagcattattgctgctatgcattacatgcagcaaggcttacgtggcgttgtggacggtataaaaggcgttacagatagcctaaagaaccaaagtgttgataacgaatcacgctctgttgagctcgataaacttactcgtagcctcaacgaagaaactcaaatggttgcttctgctatcactgagttaacagcttcggcgcaaacagttgttgaacatgcagaacaagcggcttactcagtgcaagaggcggagcaacaaggtcaaagtgccagccacttaaccagcgaggctgctgacactatcgcgcttttagagcaacaaattgacagcgctggtaataatattcaagtgcttgatgatgaagtaaataacatcgcaaatgtgctcagcgttattcaaggtattgctgagcaaactaacttacttgcgcttaatgcggcaatagaagctgcgcgcgccggcgaacaagggcgaggctttgctgtggttgccgacgaagttcgcggacttgctcagcgcacacaaaccagcacagaagaaatacgtaatatgattggcaagttacaagcagcaactcaggatgccaaatctgctgtctcgctaagtatttcaaccagtgaacaaaccgtgcaaaaatccacaaaagccaatgatgagttaaagcgtgttgccagctcactaagtgccatagcacaaatgagcgaccaaatcgcaattgccgctaaagaacagctcgatgcaggcgaagacactgccaaacgtatcgttatcatctctgatacagcatcacaaacggcagatgtttctaatcaagcgcacacagcaactgacctaattaaaggtctaacaactgatttagaaaaggaaactgataagtttagttaacgattaaaaacacgaatgttgactaaagcctagcctatcgctgggcttactctttttattgtctcagcatgattaagcattattacgtattggcataatacaaataaaaaaaccgcactctgtgcggttttttcaaaatatgtttacttttagtattaaagacctgcgcggtccttaataacagcgattagtggtgaaccaccatggccatttgcttcagcccatgcgatgtcagcaccatcttctaaagagctttttgataagttcttaacaatgtactcaccagtatcagcagcaccgctctcgatagcatgacgaagcatattattaccattacattttacagcgtcaaaaatgttacgaattttaacacgtgagctcttaagcttatcacgtaaacggtttttatcatctgccgcgatatattcacagatagatacagctaattggtcatcagctttcgctggtgcggtatacgcaaccgaagccgaaacaactgccgccacgagtaataagttagataacttcatcatattttgcccttatgcaatactttcttcgtagaaatatcggacattattataccaaccaattagttttaccgcaataatgttacgaatttttatacagggttacaaaggtatacgaataagggtttttgttatcaggctgatgctgttcttgctcagcaaccgtccaattagcaacactttcgtaatctggaaactgagtgtcaccttcaacttcaagatcgatgaacgttaaatacaatcgctcggcctgaggtaaaaactgttcgtagatatttccgccaccaataatcatgacttcttcaacatctgcgactaatgccaaggctgcctcaggcgaagtgactacctcaatgccttgtgcactgtaatctgcattacgagtaataataatgttttgacggccaggtaatggacgaccaattgattcaaacgttttacgccccatgatcaccggctttgccatggttacttttttaaagtgttgcagatcggcaggtaaatgccatggcatttggttgtcttgacctattactcggttatttgccatagcagcaatcattgaaattttcacactaaaccttaatacttttttcttattaataaaaaaggagcgcatggctccttttcagtttcaaattttatcgttggtagataacttctacatcgtagtcatcatcgtcccagtcgtcatcccaatcatcatcgtcttgagatgttgctttctgatggtaagtatcccacttaaattcaacttcttctttctcttcttcagcgaatttttctttcggcatactatcaagcagcgccatgatgtcatgacataatgcttgggtattttgcttattcgctgcagagatgcggtaaacattagtttcttcacctagctcttgagcaatctcattacatagcgcttcagcttcatcttccggcaataaatcaatcttattgaaaactaaccaacgcggcttttctgcaagtttagggctgtattggtgcagctcgttaataattgcaaaggcattatcaacagggttggtgccatcaactggcataatatcaataatgtgtagtaatacacgacaacgctctaagtgctttaagaagcgaataccaaggcctgcaccttctgaagccccttcaataagaccaggaatatcagcaatcacaaatgatttatttgcatcaggacgaaccacgcctaagttaggaattagcgtcgtaaacggataatccgccacttttggtttcgctgctgaaacactgcgaataaacgttgattttccggcatttggtaagccaagtaagccaacatctgcaagtaacattaactctaaacgtaggctgcgaacttcaccaggtgtacctagtgtcttttgacgtggtgcgcggttagtacttgatttaaaacgtgcatttcccaagccatggaaaccacctttcgcaactacaattttttgaccatgtttagttaaatcacctagtgactcttcagtgtcaacgtcagtgatacgcgtacctacaggtactttaagcgtcaaatcagcgccctttttacctgtcatgttacggctttggccatttgtgccgcgctctgctttatgaaaacgctcaaattgatagtcaattaaggtatttaagttttcatcggcttgtagataaacgctgccgccatcgccgccatcgccgccatcaggaccgccgtctggtacatatttttcacgtcggaaagatacgacaccgctgccgccatcacccgcgtcacaacgaatttctacttcatctacaaacttcatgattactcactttaagattggcttgttaataactctattatatacctaagcccttctgattgcaggcttagcttagatatatatttacacgccttattatttgccttaaaacaaaaaaccccgcaaaggcggggtttttcaaatatcgagatgattactcagctacgatatttacgtatttacggtttaaaggacctttctgttcgaattgaactttaccatctgcttttgcgaagatagtgtggtctttaccgatacctacgtttgcgccagcgtggaaacgagtaccacgttgacgaacaatgatgctacccgctagaactgattcgccaccaaaacgcttaacacctaggcgtttgctttctgaatcgcgaccgttacgagtactaccagctgcttttttatgtgccatttctcagtacctctaattaagcgctaatgccagtgattttaacttcagtgaaccattgacgatggcccatttgcttacgagaatgcttacgacgtctaaatttaacaatcttcactttctcaccgcgaccgtgtgaaacaacctcagctgttactttaccaccgtttacgaacggtacaccgatctcgattttctcaccatcagcaactaaaagtactgaatcaaattcaactgctgcaccagtttcaacgtctaatttttcaagacgaattgtttgaccttcagtcacacggtgctgtttaccaccactttggaaaaccgcgtacataattaactccgtctgtgcgccctcaaatcgacgcaactaaaatattcttcaatagggcgcgaagtttacgctaatgcgcaaaaactagcaagcctcttttgctataaaatgaataaaaaatagctgcattgagagcaattcaatatttttccttattctatcctaaaaacaccgtatgccaagcggtttttacgatctcatgacaattaaattaacacgtcaaaagcgccgttaaataaatgcaagtatgtttactattcaaccaaacaactacaattaactgttcaaatttgatttaaaataaaaaactttacagtgtttttttactgaatcagcacaaaatatcgagcaagtgctttttttgttgtacaatcagcctcgtatacccataaatattggctcggagatcaatggatataaaagctatccagacgttaatcgatcatgagatgaatgacgtcaatcaacttatacatgcccaaatgcgctcagatgtcgcattggtcaatcaactcggtttatatatagtaaacagcggtggtaagcgtgttcgccctatgttggccattttagcagcaaaagctttaggctatgaaggtaaagaccacattacactggccactatcatcgaatttattcacactgcaactttactgcatgatgatgttgttgatgagtcacatttacgtcgtggtacgcctacagcaaatgctgagtttggcaatgccgctagcgtgctagttggtgattttatttacacacgctcatttcagttgatggttggtcttggtaaaatgccaatcatggaaattttagctgatgcaacgaatgtcattgctgaaggtgaagtattacagctaatgaactgtaacgatcctgacactacagaacaaagctatatgcaggtcatttacagcaaaacagctaagttatttgaagcagcaacaggccttgcagcaattatcactgaacaagatgataaaacgcttgaggcattaaacctttacggcatgcatttaggaacagcctttcagcttgttgatgatgtgcttgattacaacgccgatgctgagcaacttggtaaaaacattggtgatgatttagccgaaggtaaacctaccttaccgcttatttatgccatgcaaaaaggcacgccagagcaaatcaagctcgttcgtgaagcaattgaacttggcaatggtatggatcacctagacagcattcttgaggcgttagctgataccaaagcacttgagtttacaatgcaaaaggcagagcaagaggctgataaagccatcgcctgtattgcatttttaccagaaacgccatacaagcaagcattagagagcttggcacgcatcgccgttgcccgcgatcattaaactctatttattcgagccattaaaaaagcctgcatatgcaggcttttttgttttaggtgctttaatagcacctatcatctatcggaattaaccgttgatgaaatcaacaccttcttggatgtctttattaagcgtttcaagcatgtcgtttttagcttgctcttcgaaagcgcttaattcaccgtaagaaagaatttcttcaacaccgttcttacctaaacgtactgggtgtgcaaagtatgctgcgtcaccgttttcaactgcaacgtatgcgtaatcaactacttcttcaccttgtaagcctttaactaaagacatacagaaacgtgctgctgctgcacccattgaaagagtcgctgaaccgccacccgctttagcgttaacaacttcagtacctgcgttttggatacgtggagttaatgctgccacttcttcgtcagtgaaagtaacaccttcaacttgagatagaagaggaaggattgtagtgcctgagtggccaccgatcactggaactttaacgtcagtagcgcttaaacctttaagttcagcaacaaatgcttctgaacggattacgtcaagtgttgtgataccgaatacacggccagcatcgtaagtacccgcttttttgaatacttcagcaacgattggcacagtgccgtttactgggttagtaatgataccaactaacgctttaggacagtttttaacgatgccttcagctaatgttttgatgatacctgcgtttacgttgaaaaggtccgcacggtccatacccggcttacgcggcatacccgctgggataagaacgatatcacaaccaactaaagcatcgtctaggttatcagcaccgaaaccttcaactttaacgtctgttgggatgtgagaaagatcaaccgctacaccaggaacaacaggggcaacatcgtataatgataattcagaacctgcaggtaaacttgtttttaataataaagacaatgcttggccgataccgccagctgcgcctaaaacagcaactttcattggaattctccgtaatttgaggtaggaaatatttgtggccctaaagataatgaaattagcgactaaaaacaaatttatcctgcttatttcgcgtataatttcgaccatagttgtaaactatactgtaaacacacagcatttagggcgagaaatgtaaactagtactgcataagtatgcagagttgtgtagaattacttcacgttttatgactacagatacggcaacatgcaaccacaagacaaacaagaagcactaatcaaagcgttcaaagcgctattaaaagaagaaaacttcggctcacaaggtgagattgtcgaagcattaaaagatcaaggcttcgacaacataagccaaagtaaagtctctcgcatgttaagcaagtttggcgcggtacgcacccgtaatgcaaaacaagaaatggtgtattgcttacccgctgaaatgggagtaccaacagcgaaaagcccgttgcgtcaactcgttatcgatattatgcataacgaaatgatgattattattcgtaccagcccaggtgcagcacaacttatcgcgcgcttactagactcattaggtaaagctgatggggtacttggtacaattgcaggtgacgacacaatttttatcgctcctgcaaagatttctgaaatagatgtcacgcttgatcgcgtgcgcactttattcgatacagtttaaagctgcttcaaaaagtttactgacggggcgaaaaacgccgaccccatatcggcttgagtaaaatcaagccaatggtcgtagcaatcgccctgccccaagcgactctttaatacctgctcaaacgcatcaccttgcgcggcacatgacaccattaaaataccctgcttatgaacatcaccaaacggcatgctctgattaagtatcaacggctggccattttcatcttttagttcactacgcactgcatgactagtttcgagtgcaggcataattaaggtgttatcaagccgagtacgccccataatttgctcttgctctgataacgacaaatgttgccaaacacttaaatcgtgcacaaagcgctgaacatgaatgtagctgccttgatcttcaaaatgccccggcctgtctatcaatgcggtactgcgtttttgtctaccatgaggggtgtcacccgcataaataaagccgttaaagtcgcggccatctaaaaaacgaaagttacgcacttgctccacaagctctacatctggcgtaaataatttcaggatctgtagggcaaaaagatggttaacatcttcacggtctgaacgaatttgtacaaataaatcaaatggctgtgcactcataacatgttcactatgagtcacattaggaaagctttgtaattgacttggaataaactcaggcaaaatatgcggccaatattgcgcaccaagcgcaaccacgcacgacagcatggcttctgagaactgatccgcaaactcatcttgaatgacgctcacgcgttttaactttttacgtaatgactcgtcatggccatcataaacattaaaaaacaggtgcaaaccatgtaagtttgcttcagcacaaatcccagattgcgcttgcgccatagtgaatccttagcttctcgttatttgcacctagccaagaattcaagattgttaagcagtactaatcatgaaaaaaattgactgtgtgcggcattatttttatttttacaggctgctcaactgcaaacacgcggtcttgctctgcagcgacttcacactcctgccccgctatattcacacgataaacataacgtgtgcctataaagcgtctgtgcaaaattgtcaggctattttcatcactctgatcagcttcacataactgaatataatgaggccgtacataaacttgcccttgtttgtgagcactgttatttactgtgagtgaatgtattacaccaaacgccgtttcgtattcagttggcgttaagactttcgccgttaagtatatgcctgtaccaagaaactctgcaacctcctttgagttaggttggctaaataactgttctgatgagccttgttgggctatttttccaccatgcattacagccaaggtgtcagcaaacgcaaacgcctcttctttcgaatgggtaacaaacactgctgatacttgctgagctttaatgatacggcggatgtcggcaattaactcaaagcgaacctgcgtatcgatattagaaaatggctcatcaagtaataacaagctgggtttataagcaagcgcacgagcaattgcaacacgctgttgttgaccacctgataattgatgcggataacgttctgcacagccagttaacttaactaagctcagcatttcatccacgcgctcacgcttttgcgacttactcatattggttaaaccaaatgcaatattgtcgctcaccgataagtgaggaaataacgcgtaatcttgaaacatcatgccaatattacgtttttctggtgcaacaaaatgcttatcatcattaacgacaagcgaatcaatactcataaaaccttgtgagggctctataattccggcaatcgcttttaacgtcgttgttttaccgcaaccacttgcccccagcaggcaaacgatttcgtcttgttcaacattcaaattaagcgcatccaataccttagtgccattgtattgataagctaaatttttaattatcaaatgactcatgaatgattttgctccatcgaacgattaacgaaatacaaaggaataagcccgactaacacaataaacagggctgagatagacgctaactctaactgctcatcactaacatattgaaaaacatgagttgcaagagtttcaaaattaaacggtcgtaataacaaggccgcgggtagctctttcatacattcaataaataccagaagcccagcggttaaaatgccgcgtttaagtaaaggcagatgtactttatacaaggtttgaaatgcacttttacccatagattgacttgccatatcaagagaagggctaatacgtaaaaagctgctttcaagggcgccatgtgcaatcgcgtaaaagcgcacaatatacgcaaaaatcatcgcaaataatgtcccactcagaagtaaacccggcgataaacctattggttcaagccattgattaagtgcatcatcaatttgtgttagtggtaacaataccgcaatcgccagtaccgtacccggtagcgcataacccgtacttgctaaacgccccggaatgagtggatacgcttgtttagcaatacgctgataaaacagtaccaacaagctaagaaggattgtcactaggctgacaacaatggcgactttaaagctctgccaagcataattaaaaaatgccccattccatgcttcatccgcataaacaatggcgtatttaacaagcactccaactggcaagacaaaagcaagtaccagcacaactgtgcagactaaacttgcagcccatgctgtgctaccttttaagcgatataaggttgcgctgttaatgctcgactggcgttcatacacagcttgattacgacgactaaagcgctcaaccataatagtgagaaacaaaataagcagcataatgcctgatatttttgccgcagcggttaatgaataatagccaagccaggtatcgtaaacagcggtcgttagtgtgctcactgcaaagtaattaacagtggcaaaatcagccatagcttccatactgattaacgtaactcctgccacaattgcccctcgaccaagcggtaaacttacccgtaaaaagctttgtaatggcgataaccccattaactgactagcttgcactaatttaaaagattgctctcttaaggccgttttaaaaataagataaagatacggatacagcactaatgcaatcataataattgcacccggcaaagttcgaatatcaaaaaaccaataatcatcgggtgactgccaatcaaaccagtccctgagcgcaatttgcacaggcccagcataatcaagtaagtccgtataaacataagcaatgagataagttggcattgccaaaggcagcatcagtgcccattcaaagtgttttcgaccaggaaattcacagtacgcagtcaaccacgcaagcggcagcgcaataacacagctcaataacccaacccctgctatgagtacaagggtattacgcgtgtagtcccacaaaacagtatcgaataaatgctgaaagacatccgaaccaccttgcagagattcaaacaataaaaaacctagcggcgtaacaagtagcaaaccgattagccaagccaatacttgccaacgcgacaacgaaaacttcacatgcataagtggattaataccagataaaataaaagctgttaaaaaacagcttttataaaagacgaggaaaaacctcgttataagtcaaactttacttcgtcaataagctttaacgcaacaggacggtatttacttatttcatcaagagcaagactatcttctttaaactcaccccatgacgcaaccatctcagacaatgcaaccccttgctttacagggtattccatattgaccgaagcatacatattttgcgctttattgtcggtcatatactcaatcagtttcaaggcattttccggatttttagcgtatcgcgtcataacaacacccgaaacattaatatgtgagccacgattggtttggtttggaaagttaatattaaccgcttcagcccatgacttttgctgctcatcttgcatcattttaccaaaatagtagctgttgcctaatgccagatcacataatccttctttcacagctttgacttgcgctctgtcgttaccttgtggcttacgtgctaaattggttttaacgccctctaaccattgtttagtttttgcttcgccatgatgcgcaaccatagaagcaactaaacctaaattgtatggatgcttacctgagcgagtacagattttgcctttatatttgggatcagccaagtcttcataacttaaatcagcgagtgcgccaacacgctcttttgaagagtaaacattacgaactcgtttcgttaaagcgatccattggccatcagcatcacgaaatgtgctaggaacatttgcatctataacatcgctttttattgattgagttaagccaagatcttctaattgaataagtgcgctaaagtttgaagtaagcaccaaatcagctttgctgtgcttaccttcacgtttcacacgttcaattaaaccttttttcgcaaacaccacattggttttaataccagtctgcttggtgaagtcatctaaaattggctgaattaagaatggttgacgaaacgaataaatattaaccacatcggcagaaagtgctgacgtactcattaaagtagtcaaaatcagtaaggctgtttttttcattgttggcacctaaataataacaattatcaaaatattttacctatactctgctaaaagtgcacccgtttatattccccctataactttacgtactgccatttgagaacttacttgtaagatatatctcacctaaatggcagttattgagtaaaaaaactcgaaaaacggtccctaaaaaagcttaaaacattgataaatagtgatttattattaattacaataatgtaaccgttattttaattgcgattttgacctattcgatgctcactaattccctatacttacatacaacaactaagcaagaagcttaatgagtaaacggatatggaagtattactcataaaaccgcggaataaggttcattaggataaaaaggaactaaggacaggctcaggaagagtatcgcaatggaatgacacactaaggacaacatcaggatgatgtgaaatggcataacaacaggacgttgttatacaggatgtttaaaaagtggattaaaggacaggccgaaaggtatcgcaatggaattgctaacatatggatagtgtcaggacgacgcgtaaaggataggtaaagaaattacccgcatggatgtaaaggagtgacaaggaaacaaggctggaaagccttacattgcatagaaccaaaaagtaaagtgcaatcgcatggataggcaaagtttagggagttgattagattcaattgcaggatgcaaaaaattaagaagattccgcaagcgcgactagcaatagttcgcgcttttcttttgcctaaaaatagttattccaatccgcaacaatacttaatcattttgagggattaattaagcaaagtagtattactctgggcgtcctttatttcgctttcctagtaaatatgcatccctaaactttataaagtgcgtttcgagcttttgtgtagcatctacttcaccagcaagcgcaagcaccattatagcgacctcagctgtaccaagttgatgctcatgtggagcaactcgtaaacgataatctgaaagcttttctggggtaatagacaatacaggtaagttatctaaataagggcttttgcgaatcatcttttttgcttcacgccaagtaccatctaaaaagataaacaatgggcgcttaccttgctgtggcgatacttcatcgattactcgcgtttcatcttcaacatcactcgccggaaaaatcaccattggctgatattgtgggtcttgtaataaggctaataatgcgtgatcaggttctgttctgtcccacttaaatgcatagttttcaggaataatttcagcaatcaaacgccctgtattcgatggtttaaagctttcattatgatacatcagtaaacacactgcggcattacactgcgcttgttcaacaccttcacaaatgcaatagttttcagctaataaacaacgctcacaacgagtaagctttgcacctcgtgctttaaattcgcgccttgattcgctcatttgctgtgcgcgaagcgctaaaactgcgttattaaaaatattagccactgtgattaccgaaaaattaaacggcgcatattgtagctaaaattaatggtaatagaaatctaccatctaatgatgagttatttttataccaaggctaacaaccttactaatgtcatctttgtaagttcacccatttgttcatgattacttaaagcatacacagcaccttcaacggcgctctcatctatatcttgacgagactctaaaacactggcccaaagcaccagatcatcaaaatcaatttcaccattaatagctcgctctagaacttggcgaaatactgtcttggtcaatatatattcaccctcttggctatctgggcaggcagcaattacagtgatagcctcatcccaaagctccccaaaacaagcgaactgacttaatgcgtgtaatttatccatttgctatgcttaccttttaaactgaccggttaatccttgactcaatgacaacccttacctgctcacactgcggtgcctcattaacatgtcgtgctgatgatataaatgcctgctggtgtaacgaactgcctgcaatcttacctattaataatgcaacatcctgcttatgtcgtgagtgtactataaaacagataaatatctttttatcaaaactatatgaacagcccctggctgagcaaatagcctttgcgaaacccttttaccagcatggtaatttgattgaaaacctcgattacacattagaaaacaactatatggtgtttagccgctggttctttttaaagcgtggtaagtgctgcaccaacgggtgtactcattgtcccttcaatgactaacgactcctcactagagtatttattcaaataacgtgaatttttttgcaaataagacatgacggaaagaataaaaatacattataattggatataaattcactaattcactctagaattacgcttaaattattacctttgtttaatttttgagcataaatttactacaacataatcggaatcaatcatgaacacctttaagcctgctctacttgcaagtgcaatttctgcggttttaatcaatagcaatatggcgtttgcagctgaagatgcaatagaagttgataaatcaattgaaactattcaaatcactgcaacacgacgtgcaggttcagtgcaagatgcaccgcttaatatcacagccctaaatggcgatgtaattagcgaccaaaacattggtgatcttgaagatgtcgcgcgctgggtaccaggcttaacaatttctgatcaaggtggccgtgaaggttctccgataatcgttcgtggtttaaacacaaatacctctgatcgtatttctgatagtggcacagtggccacttatgttggtgaaattccacttagcatcgacttacgtttaactgatgttgaccgtgtagaggtgttaattggtccacaaggtacactttatggcgcgggaactttaggcggtgcgatccgttacttacttaagcagcccgatctagatctaacagaaggtcaggttacaggcgatgtatttagtatcaacgaaagcgacggcaccggcggtgagtttggcgtggtattcaacactccgcttattgaagaaaaactcgcatttcgtgccagcttaaactattacgataaccctggttacattgactatacgcacgttgttcaagagcctggagtgtcaaacccgaaccctgacttttcagacagcagcgatgtaaacgccaacttaaaaagcgtaagcgatgttaacgacgagcaaattaccacagcacgtttatcactgcgttggcttgcaaccgaagatgttgatgcaacacttaactacttttatcaaaagcaagaaaatggcggtaactcaacatcgcaatacggctcacttgctgatagcagtgcgctacaaggcatcccaggaaagtacgaaaacgtagctcgtgtacttgagcctggcgaagaagaaaacgatttattaagcttagaagtaaaagcagatcttggttttgctgagctggtatctgcatctggttggtctagctatgaacagtctggtcagcgcgatcaaactgatcttctttacgatatttggtcaggttatgccgacttcccttcttttgttggctatacacacgacacctcagaccgtgatacgtttacgcaagaacttcgtttagtttcaaatagcagtagtgcttttaactggattgtaggtggcttctataacaaagtagaaagctactcagatgatcgtgagtacacgccgggtctgactgagtactggggtggcggcattccaaatgttgaacaagaccttgagtacattctaatttcagatagtgaaaccactgaaaaagcactttttggtgaaatcggctacagcatcacagatcagtttgatgtaactttgggtgctcgtttttacgaatacgatgtatcaacaacatcaggttctgcaacaccgctttactcaggggattttgattcactcgataatctagttatggaaaatgtaagcgccagcgataacggaaacttattcaagtttaatgctaactatacattcgataatggtgtgcttgcttactttaccgtgagtgagggtttccgtattggtggtggtaacggtattgccccttgccctgatgtactacctgaacaacaaattgtttgcgctctaccaaacgaagaagattacaagccagatacaacagtcaactacgagctaggctttaagtcgtcatggttacgtaaccgcctacacttcaatgcagcgctatttaatgttgattggaaagatgcgcaagttggtagcagcactgtaaatggccaagaattaattacctcgaacgcaggctctgctaattctaaaggtgttgaactttctactcgcgcaatgattggtgataactgggctgcatatgcgacatacgcgtatgcaaaagctgaattaaccgaagatgcgccttacttatttggtgtattaggcgacgacctagcgcaataccaaagctactatgatggtgccaaaggcgaccgtttaccgggtgctcctgagcatcaattctcatttggtcttcgttacgagcaagatatcctaggcgataaactattaagcgtaaactacggtattacagcgcaaagcgatgtgatcaccaaagtaggcttaaaagctgacggcgaagtattaccgggttatgcactaagtaacttatctgccaaaattactggcgatatgtggtctgcaacgctttacgtagacaacttattcgataaatatgcattcacttctgtacgtcgtgataagtcttgggcaggtatgtcgcaatatgctgagcttaacaaagagctacctgagctacagcgtgtttatggtcactacaccaccgcgcctcgtactatcggtatgaagtttagctacaactttgagctgtaattaaacatacccataaaagccttgccacctttaggcagggctttttaataccaattcgcttaattaagtggtctattttgaggcaagaaaacctcgttgatagcaaggcaaaaatttcgttatttagttgttctaaatcagaaatttttaacgcagctagcgacaggtttaatccctgaaaatgattaagtattattgcggattggtataatacctgaaaataattaagtattatggcgaattggtatactatgcgcttatgctaaatgatacccaacaagcgcttcgcgctcatatccaacagttgttaagcaacaagcaactgaacgatgcacatcacctacttgtgcagcgcctaaagcaaaatcctgaagaccacgtttgttactttttactcagcgaagttaacaccgcagctggtgatatcaacaaagcgattaaactccttgaaaaagcgctaagcctagcctcctttgcgatttaccatttagcccttgccaagttatacgtactattaggcaaagtaagtaatgcagctgtgcactatcaaagcgcgttgcaaacagctgactttagcgccgctgactttgatacattagctaatattgccacccgtttagggcattatgacgacgctcttaacttgcaaaaagcagcctaccaacgcaacaaggataacctacaaattagctataatttggcggtgtgttataaaattcacggactgttcgatgaagctaaaagcttgttacagcaactaactacaaagcaacctcgcttttatcaagcccactattcgcaggctgaactcaatactgatgtagatgcagagcaacatattcaaaaactacaaactttggcggataaagaaaaaagcattgttaaacaacaagtgtattttcatagtcttgctcttaattatgagcacctcaatgactacaaaaatgcatttaagtactttgcactaagtaagcaagccatagcaagtaaacttaactatcaagcaagccaacaccaccacttttgtcaaaagctcattacgcaaagtaagcagcaagtacttacaagaagtgactctgagttctcgcctgtttttgttgttggcatgccccgctctggcacaaccttagttgaaaaaatccttaatcaaagtacacagctacgaggtattggggaattaaatgatattgcgcaattgatacaacacgccacgcaatcagctcgtgtgattgatagcgaaatgcttgataaagcttattcatcaaccgctgtaactaaagcactcgctagctaccaacaaagagctcagctgctaagtggtggccaaagaagttgtgataaacagccatttaacttttactatattgattttattttagcggcatttcctaatgctaaaatcgtttgtatgcaacgagagtggcgtgattgcagcattgccaattttaggcagatgtatagcccgcaaagtgtgtttcatcactacagctttaaacttgaagatatagcctcattccatcaagattacttggctttagtcagtcattttgccaacaagtatcctgaaaacgtttttttacaaagctatgagcaattagtggccgagcctacccaacaaactcagaagctctatgctttttgcgatttaagctggcaggaaaactgcctaaatttttataaaaacaatgcagcatcagccaccgcgagtaaaaaacaaattcgccagccactgaataaaaacagtatcggcagctggcaaaattacgctgagtttattgatgcgggcctgtttcaataggtaggtcgtgacgagcgccccattcactccaagagccatcataaacacgtaagttagcgtaaccgcattcatcggcacacaatgctattgcacaagcggtcacacccgaaccacagctaaattgcaactgggtatgatgcggcgctatatgttgctcaaataatacctgcaactcgctaagcggtttaagctcaccatcattcaatacagttgacagcgataaacaacgactattaggaatatgaccactgcgcataccttcacgcggctcagcttgctctcctgtaaatcgagcataagggcgtgcatcgagtgttagtgtgctttgctcatcaagtgagttaagcacttgctcagcactaataaagtaatcagcgcgcgggcttgcaacaaaattgccttgcccagaagcagctgaatagcttgcttgtgttgcaaagccaagtgcctgccacttagctaaaccaccacttaaaacttttacggtatcaaaacccatggctttaaacatccaccatgcacgcgctgaactgaataagccttggtcttcataaattacaaccagtgagtcttggttaacccccgcaagctgcatttgctcttcaaattgctcgctactgcacatcatacttggtacagggttagtgctatctgccaacgtatttttaaagtcaaaacgctgtgcattaggtagcattgctttaggcgcatattccccagacaggccaggacgcaccattccggcatcaaaaataaccaaattatcgttgtttaaatgctcgttaagccattctggcgagacaatgtttttcattaactttccttttgcgatagctgtgcaaatgtatcttgctgagttaagcgcttttcgaccgcttcaacatgctcagttgtacattctttccaaacaccgggcaagcaatacacatgctttaagtaggtaaaaaatttatctcttacaatactatttgcttgccagccatttagtagtttttctaagcacttaatcaaagtatcttgatcactggcgtgtagtacaagctcatcaatgttgtaacaggcaagtcccaaggtaatcacttgtttatctagtaataaggactctaagccgactgtcgagttaattgtaatcacagcctcagcgccattgatgagttctcgagtacagttgccatttgcaaaaattgcaacgtcgtctttgtcgtacaagtgcgcataatgcttatgccaagatgggtgttctttaaatacaactttaaggtttggatctgctaattctctcactgaggccacaactgcatcatataacgcttccattgattttaaccaaggtgaataacatgctatctgtgtatcatgaggcacttggaaaggcacaaaaagatacctttcgggcagctcaatagcatcaaattgacaacgctttttatgatttatacgaggaattaactcaggagctgaaaatggtagctggttagctttgtcgaaattcaaataaaactgactgtttcttggcaaagatgcagcatagttaataccactcggatctaaactagtcgtgcccggtagcagcccattttcgtaaaaataagtagtcagtcctagctgtttagcagccatacatactgtgatatttggcagcttattgccattccaaatcaccaatgcttcgggtgactctgatttaagtaaatcatagtacttagcaaagcggcagcgctctacacataacataaacatcgtataaacttttatgattactgcattactccacaagctatttcgcgcctgcttgcgtaaaagttgatttgcaatagctttattaaagtcaacttgcgacgctttttttaggtattttaaagcgcctaatcgcggtacgcccataatatgcagtgtgcaattgaaggatagttgtttaattaattttttataatagcgtgcatgtacattgctgcgagagataaaaataaaagccatatgagaaaatcttaaaacctaaattagaaagaagataaatgtgcatatagctattatgttaattttagatgacagtattatggctgccttacgacctcaattatttctgtagtcgatatagaaggggttcgcgttaaataagtcacatcgcaaagatgtttaaattgatcgaagcgtcctgcccaatcatcgcccataacaagtaggtgagcttgatgatttttaatatattcgccttttagttcaagagagtgttcgacaaacacttcatcaacacactttagagaactaataattttcagtctgtctgattcactatatacaggcttacgaccctttttagtttgatttagttcatcagaagatactccaacgattaaataatcgcccaaagcttttgcccgttccaaaatattaatatgacccacatggaaaatatcaaatgttccaaacgttattacacgtttcatttatgctcctctaaataagatactattcttttagctgagcgaccgtccgttttacccgctagtttattaataatgtgttttcttgactctttaaactctgctgtctcacaaaactcggagttaagtatagtttgcaactcgttatagtctcctgcccgtaagcaaagcttgttgaagtatttaatatcttcatctaatcgagatttaagtcggaatgaaaaaataccacgatatgaccagcgtaacttataaaaatcacaccatacgacaggcttttcaagtgctgcaaattcaaatatggctgatgaagcatcagataccataatatcagcgattgctaaaaaaggcgttagatcaaagtcatgctcgttcgctacataaacatttttaaactctgaccatcgctgaagttttgttcgctgctttttgtacttttgtttaaacaagctaaagaagtgcggcttaatgatgatattaaacttctcacagtgtgcaggaaaactgtcactcatacactctatcgagcttggataaaaagtaggggcatataaaagtgtttttttactggggtctaaccctaagcgactgagatcaatatgactcattgtttggttgaaaataggatctaatttggcgtagccactatcaacaaagttaccgtctgggtataacgcttggaggcgctgcaacctgtgctctccctcaacaaaacgtaccgttgttttattatgcgatacatcataataacactgcttggggccaataccatgttgcatcaacgccgttttcttattgagctgctcagccccggcaaaggtattaccaaaaataacccaatctgcgtctgagttttgatagaaagagaaggtttcctctttatttgttaaccaaaacgcattaataccctgttcttctataaaccttttacatgcagccaaactgcgtgcatcttgattttcataaaaaaccatcgacacttggtgaccatttgataacaactcctttaatacaggggtgtactgcggaatgtaataaagatgttgaacatcaaagtatagttgcattttttacagctttatagttgataatgccggccattgtacataaattacatttttgtttcagccatcaataaaaagtttgttaaaagctaaatattaataacttccgggcgaaggggtgctaaacggcttaaaatcttgttttgcactgtttgcgggatctgttgctcatccatcgcgtttattaatagttcaacaactcgattaaagtctttctcagtgatatgcatgccagtatggatatcgaccatgctatcaccttgatactcacatgggccattggtaacactgcacaagtggataataaatccttgacgaaagtgtgcaacattcgtttgcttaaaataaggcaaaatatcagcatcacggcctatttgattgataaaactatcgactagactttcaataccttgttggccgcctacctgctgataaacggtgtcattacttttgcctgcacaaccaagaaaagtaatacaacacactagaataaaaagacgtttcatcattaccaataccctgttacagaaagataccaaccagtttggtcgtcagcaccagcgatacgccctaaatcgagccacgcagctgttacacttacatgtttattaggaaaccaggcaataaacacatcctgccaatcttgctcccctaagccaaggttgttggatttttcacgatactcaacccctacagctaattggtgcgttaaaaacaccgctgtcgatgcttcaaataatacctctttatcgctatcagcaccgccaaagcctaacaaacctagttgattcgcatcgctgtagcgaaaggtggtattccaaaaccagttgtaacctgcaagagcgcccaagtgcaacttgctggcagctaagtagatatcagtaccgctggtgtcttttgcacctaataggtttgcaatactaccgtcatccaatgatttatgttgtacacccaagctcaactgtggccatttactgtaaacaatatcgccatagacacgtacttttgcgctagtaattgattgctcaatatcggtatttaatgcaggaacttcaaagcgctgctccgcgtagctaagctcaacacgatcataaaagttaacttgtgcaccacatacatctaagctgtaatcactcacatctgctcggctacaaaaaccattgatggctatttcgttatcgcttgcatagcccgcaagttgcgcccaaggtacgataccgccgccagcgctgccttcaacttgcgatacgcctggtgttgctaataattttcctgaagctgcgtgccccgtacttgcaaaggctaaaagaactaagctaaaaaacccattaagatgcttcattgtatacctctaaccactgcaaaaattgctcagattttagtggtctactcaaatagtaaccttgtgcataatcacacttcatgtctatcaataagtctagcgatggtttattttcaacaccttcagctacaacagaaaaacctaactggtggcctaagttcaccgttgactcaacaataaattgatcttgcttcgattgatcgagttgtaaaataaaacacttatccagctttaactcatcaataggtagtagcttcaagcgccccaatgaggtttgcccaacgccatagtcatcaagtgatatttttacacctaatgtttttaagttttctagcgctttaatgccttgctcttcattttcgatcatgtcgcgctctgttagctctatcgtgatcaaatggccacttaaattatgttgttctagctgttttgctaggtgcgaataaaaatgaggataagcaatatcttgtgcagaaacattaatagcagcttgcatcgtaatcccttgctgttgccactgtgcaacttgcgaaaccacggtcttcacaacccatgatgtcagctcaacaataacacccgactgttctgctaagtcgataaacaactctggagacacccattgaccgtcttttcgctgccaacggatcagcgattcaactttatcaatacgctgtgttttaatatttagcttaggttgataagtcataaacaactgaccgtcatcatccaataatgcctgctttaattcatcaataatcgctaaacgctcaaggtgttcttcatcttcgccttcttggtaataatgaatagctttgtgctcacaagaagcggtatcaaccgcaatcaatgctcgtctcattaaatcttcaggactgacactttgtgaaaagcaatgcacaactcctacactaaagcgtaacgtgatgtttaagctttgaattaaataacccgcttgtaattgtgcaagcatcttcatgacagcatctttaaactgcccggtatctcttgctggcagaatggttaaaaactcatcccccccaatacgtgcattcattccttttgagtgcgctgcaaattcggcaatacgttgtgcaaccgcttttaaacaatcatcaccaatacgtggtcctaacttatcattaatatgacgtaagccacgtatatcgattgcaaccagcgtgtattctgcaccttcttcaaataatgactccattgcttctaacatcgcagagcgggttaaaaagcctgttaaagagtcatgacttgcttgaaaacttatttgccgctcacgctcttttatgtcattacccatgttattaaatgcatcaactaaggtaatgatttctgtactttgcttattacctacaaactcagctttatagtttccaagcgcaaattgttgtgccagtgaggtgagctttgataagggagtggtaaggttttttgctaatatgccactagtaagcacacctatcacaaccgttatggcagcaagaataataatagtaaaaaacagctgctcaaattctcggtaactatgagtaagatctgcacttaacaatacagaaactaaatgtcctggtagagaaggtaactgcacaagtcgattacgataaacgggcttttcaccaaaaatacgttgtgttgtttgcgtattaaaatgcgctaatactgagttattttttggctgctctgccagtgatgtttcaaccacaccatcatcttcgccaataaaactaacatccatcgtggtgagattttttagctcttcagccacacggtccgtgatttcaaatcccactaaactatatgccacagtacgaggagctcgaactggcaataaaatgacctgataaagcgttttatctaacacaataaagttcgattgatcagcattgaccataagctgattcattaatggggtaaattcactaggcgtatgattaaaatcagtatttgcggaaattaattgcccagacaaatcaattagcatcatcacatcagcatttatgcgacgactgtgattattcaacacactactaattgtgtctgcgtcttgagtagcaaccgcttgcttaaacccaaaatcagcggtcaacacttttgcagctgtaagtaataaactttctttagcacttagatactgtttaaaaacattttcagcaacattaatgtcttcaagtaacttttgatcattaaagcgattcgctgaccaccaggaacttaccaagctaactaagctagtcaaaaggactaggctcacacacaatgcaatgatgcgccctcttaaactattaatcattgttgcccttaaacatttcaccaaatgtgtttcgtggtgcaggttcttgaacgttaatgcttacatctttgccttgctcagataaggtgactgattgctttttagtgagcggtgttaattgattaggatgccacacagtaaaggtagtaggtaaagtcacgccgttaagagtcactttgccatcagcagtggtttttatgactttgttcgaatttgccacatagatataccccaccattgagtcatgaatattacaacccagcacaacaacaccagggtcttcaaagcgctccggctgctctggacggtctgaatataatttaatatcaaatactttactgtgcttgaatgaatatacatggtggcgaatgttatcactgttaggaaagtccacagactgccctggttggatcactaaaactgacggtgagaattgtttatctacctgatccattatcgctactggcaaggattgcggtgaagaatgtgctgaactttcaagctcaataacggcgttagctaaaggctctccagattgatcacgcacaacaaacgaaagatctgcagcgaataagtttatagagctgaaaaatattgcaagaccacacacagcgcgaacacaatgcgcaaaaatcgacataattagatccttgcttagcttagttagctaattagtataggttaatcttagtttaagttaatgactagaagcgttaaaagcaagaaaaagccaagctgttttcttagaaaaaagcttggctttagtattattgacctagcaaattgctaaatctgattgataaaagttaaccgtgcttaattaagccgtattctttatctaatatcgcaatgacctcactacgaggatcagctggaatcataatttcttgcccaattattttgctggcaatgccaacataggtattagacacttcaagcatcacagattctggcaatgtgtaatcttttgctaactgctcgcgctcatccatgcggtctttgtttaataacacgtcgctgtctggtacgttattaattaataactgacggaaaccctcttttgagttttcaataattttaccgtcacgataagcagggccatcccaaatgcgtgatgaatcaggtgtacccacttcatcgatgtaaataagcttatctgagccatcaatgtcttcaacataaccaaattcaaacttagtatcgacaaagatttggtctagctgtgcaagttcatcactgatcagcttaaagccttcaacaagtaattgctcgtatttagcaacatcgtcttcagacttgaagttaaaaacagctaagttattcgtgatgttttcacgcgtgatattcacatcatcaacttctggaatatcagcaacaccgcggataatacctttggttgatggcgtgattaacacttcttctagcttctggttcgcggctaagccctcaggtaaatcaataccacagaaattacgcgtacctttagcgtaatcacgccacatgctacccgtaatatactgacgagcaatcgcttctactttaaccgtactcgctttacggacaatccacacatatggatgaggaatatcaacaatgtgattacccgcaaggcctgctttatcaaataacttaaaccaatgagatgccactgagttcagtgcaatccctttacctggcacgccatttaagccgttttcaccttgccaaatacaatcaaacgctgaaatgcggtcagaaataaccataatagccagctcagtaccttttggaacttggtaccctttttcactaattaaacgagcgctgtcttcatcagttaaccaataaactgaacgcactttaccactatgaaccgcaccttttgtacggatcggtaaatcatcgtttacgtctaaaactttatagctagtcatgctatctccgatagtatttggcatgctcctgtgagcacatgtatgggattggggttatggccgcctataataatccagacgtgcttaaagctcaatcattgcccggttatctgcgcataatcaagaacgctaaatacaataaataattcacgattctgtaattttgctgtcataagcgcgatttcgttataatattgtctcgcaataggaggtgttcttggattatttagcagctacagcagacaaaaaatacttaatgtatatttctcaaaactactcttacgctattttgcgtcctttacagaaggagattctagcgcgcggaggcgaagtaaaatggtttttagagggtgatgaagttaatcctgactttttgcactctgatgaatcttgtctcacttcaattgaatcggtaatagattggaatccagatatttcttttatacctggcaatattattccaaactttatacccggtaaaaaagtagctgtttttcatggttttaactcaggaaagttaaaccgaagaggatatgaagatcacttcaatataagaggttgttttgacttatattgcactcaaggcccaaatacgagtaaaagattttcagagttagctaaagcacatggcttttttataaccaaagaaacaggttggccaactcttgatccgttattttcgaaaatggcgaacaatccatacatagatgagagcgatcaaaggcaaacgcttttaatttgttcaacattttctcgcaacctctctcttgcccctaaattatacgagcagataaaagcgtacagtgagcaaggaaagtggcgaattttaatgcagtttcacccgaaaatgccaagcgagcttgttgcgaaatacaaagcgcttcaaaatgagaatcttacctttgtcgagaccgataatgtattaccgctattacaagcggcagatgtcatgctatgtgatacatcgtctattttgttgatgtttatcttacaaagaaagcctgttgtcactttctgtaaccaagcacccggcgaacacctaatagatatcactgatgccgataagctaactgaggcgatagattatgcctttacacgaccagctgaattaatggaaaaaattgagcagttttgtcaacagcttcacccttatcaagacggcttatcgagtcaacgtgtacttgctgcaagcaatgaattactattgagcaatccagcacttaagccaaaaccacgtaactttattcgtaactttaagatgcgcaaaaaattaaattactggcgatggtaacaattgataggtcgttatgatcacgcttgcaaacgtgctattcaagtggcacacaaaacaacctgagccgacgatcaatatttctaaattagatattgatcaaggcgaacatgtttttcttcatggtccaagcggctgtggtaaatcaaccttattatcactgctcgctggtgttactattcctaatcaaggtcgtatcgaattacttaataaagcgataaacgagcttagcaacagtcaacgtgaccgttttcgtgccgaccacatagggtatatttttcaaaactttaatctattaccttatttatcccctattgaaaacgtaactttgggatgccagttttcaaaacaaaggcaaacaaacgcattaaaaaatagtgcaacattagcagcagaggcaagccgcttactcagtgctttagggctaaatgattccttgcaacatcaagccgttgcacagcttagtattggtcaacaacaaagagtggctgctgcgcgtgcttttataggtagccctgaaattatcattgctgacgaacctacctcagcactcgatacacaaaatcgccaagccttcgtaaaattattatttgagcaagcaagcgcggcaaatagcacgctggtgtttgtcagccatgatgaaacactacaaacattatttactcgtagtatcagccttgtcgagttacaaggaggcacacatgctactcgttaaactcgccgcgaaaagtttattaaaccgtaaagccagtgccctactcacgttatttacgatagcaattagcgttatgctactgatgtcgattgagcgcgttcgagtcgatgccaaaagtagctttagcaatacaatttcaggcactgatttaattgttggcgcacgtaccggtgacatccaactactgctgtcttcagtatttcgtattggtcatgctaacaatggcgtgagctggaaaagttaccaatacatcacaggtcaacgcggtgtaaaatgggctattcctatgtcgcttggcgacagccacaaaggcttagctgtgcttggcacaaataaagactattttgagcactatcgctttgctaaaaagcaaccgttaagcttttcacaaggtcatgaatttaatcacttgtttgaggttgtgttaggtgctgaggttgccaacaccttaggctatcagcttggcgatgaagtggtgattgcacacggcatgggcaataccagctttcataaccatgacgataacccatttaaagtggttggtattttaaaagcaacggggacgcctgttgataaaaccctacatattccactggcagcaattgatgagattcatggcggccatgctcatcaacatcaacccgctcaggctgatgcaaatgaccacgaccacgaccacgaccagcatgatgatgttgatttagtgggtacaccaaaacaaataaccgcttttttacttggttttgactctccgctttataccttacaagtgcgtcgtaatatcaaccaatacaaagatgaagcactgcttgccattatgccgggtgttaccttgcgtgaactttgggaaatgctttctatcgtggaaaaaatcttgctgttattttctattgtcgtggtactgatcagtttacttggcatgttaacgagcctgctttcaagcttaaatcaacgccgcagagagcttgctattttacgctctgttggcgcacggccttggcatattttcaccttaatcagtgtcgaatcgttactcattacagggcttggctgcattgttggcaccgcattgttctatgctttaatgctactcggcgcagattacttgcaaagccatgccggaataagcctaaatatagctttattgtcatcctatgaacttatgctcttagctgcgataatggtcgcaggctttattgttggtttaattcctgcaacccgtgcgtatttctactctcttgctgatggtatgagtattaaaatttaaggaatgttatgccgttttttcgaaaactcgtcgctttagtcacattatttatgtgcgctacagccaatgctggcgcaccaaaagaaattttctgggaagatttaattcccaaaggtcatgtccaaatcgacacccaagcacaagcaaaccatgaaggtagcgagcaaaactgggtgcaaccagaccttgatgcacctgtggtaaaggagcttgatggaaaatcagtgagtttgcctggttttgtggtaccactagaaggcgatagcgaagtgatcaccgagtttttactagtgccttattttggagcgtgtattcacgtaccaccaccgccaccaaaccaaattgtgcatgttactattaaaggcggtgtgccaatcgaaagcctgtacgatgcgatcgtagtgacaggcgttatcagcacagaaacatggtctggtgaaattgctcaagtaggctacaagatgaaagccgttggcgtagcaccatttgagttataagtttttaaagagcatgcttttgcatgctctttaaattaatccactactttttctttttctaattcctgttcgctcaattcataccatccaccaccaagggctttatagagcgttgctaggctttgcagacggtcattctttgcctgcgataacgctatttctgccgaaaataactgccgctgcgcatccattaaatcaagtgaactggcaacaccattgctatacctaaggcgtgctaagcggtagtaatcttgactactgagcaccaagcttctttgcgcatcatagctttgctctgccgactggtagttcgataactgattgctcacttcttgcagtgccaccagcactgttttttggtatttgatacttgcctgataagcccgttgttccgcaactgttaaatttgcctgattgcggcccatattaaatattggcattaacagctctgagcccagcaaccaaacctgcgaattactggcaagcaaatcactaaaattagtactttcactaccaagctcagcatacaaattaagttttggaaataacgccgcttttgcgaccccaatctcagccattgctgcttgccattgatacattgcttgttgcacatctggcctacgctttaacagttcgctaggtaaccctgttggtagttgcttaggaagggtttgcacagataactcattacccccttgcacatcagcattggcatcaccaattaaaaactttaactgattaataatccgcctttcactgtgctgtagtggcgggatcttcacctttgctgattctaactctacttcagcttggcgttgttctagccctgaaataataccgccttttttacgaatacgcgcaatttcaagctctttctcacgaagcttaattgtacttaggctaatttttaattgctcttctacttctttaagggcaaaaaactgctgcgccacatcagcaatcaaggcgagctgcaaggcattgcgagcttgctcttggctataataatttgccagtgcggcttcgcttgcgcgccggttgctgccaaataagtctagctcccaacttaagtaaccttttaaatcaaatgagttttcagggctactattaagctcttcttctcgttctgaggtaagccctacgcttacatcaggccataaagcggcatcagtaatccgatatcgagctcgcgcttcgataattttcgattgcgcaattaacatatcttgattattaaccagcgcttggctaatcagtttttgcaaatgtgggtcgctatatatttgcttccacccagctaaagcttcagactgtggcgttgctgcggcccccataaagttagtgactttgctatgctcaggcacttcaaaatcagggccaacagcacagccttgtaagcaagcaaaacaaaataatggcaacaatttatgcatcaacttgctcctttgctaacactttagagacaggtgcttgctgttttttcacaaagcgtgcagcggtaataaaaaacaacggcactaatatgatgccaatagagcttgccagtaacatcccccctaaaataggcatagaaaccgactgccgaccaactgctccggggccagaggctagtactaacggcaaaacgccaagcacaaaagaggctgcggtcattaagatgggccgaaaacgagaacgggcggcttctattgcagcatcaacggcattcataccttcttggtaaagctgattagccacttcaacaatcaatatagagtttttcgctgcaaggcctatcaatgcaataaacgcgacttgaaaaaataagttgttttcatgccccgtcaccaaggtcaatatagaggcccctaacatggcaatagggctgataagtaataccgcaaatggtaatgcccaactttcataaagcgctgctaaaaacaaaaaaacaaacacaatcgccaaactcaccgcaatgcctagttgaccggatgagcgaatttcttgataagttaagcctgtccattcatagccaatatttgttggtaatttagccacttcctctttaattactttaatcacgtcacccgatgcatagccagtagctggtgacacattcaccatggcactggtaaacatattaaagcgatttatcgcagacggaccggttgttagattaagcttagcaagcacatttgatggcaccatagcgccatttttagaacgcacataaaattcgttgaggttttcagggcgtgctctaaattcatcttcagcttgaactttaacccgataaactcggccaaataagttaaagtcgttaattgttgatgagccagtaagcactttcattgtgctgtagacatcggcaatcggcacctctaatgccatggctttttctctatctaactctaaaaacagctgaggtactgagccacgcagtgaactacttgctttagcaacttcagggcggttatttaaatttgtcagtaaaacctcaagcgattcaactaggcttgttaagttgcctcctgttttttcttgtagtgcaaactcaacgccagagcccgaaccaagccctgccacagctgatggttgaaacacattaaactcagcatcgggaatggcatacagctgcttacgtatatcattcatcacacttgtgaccgtaaatccttgctccgcacgcacttgccaaggttgtaaaataacctccatttgaccatgcgattgcgcactaccagcacggcggttttcacccgcgagagtgaacgaataagccacccccgcatggttcataacaaattggtttgctttgcttattacttcattggtacgtgagaccgttgccgcatctggcaaggtaatatcaacaaaaaagcgcccttgatcttcttgcggcataaagctgcttggtagttggctaaacataaaatagcctcctactaacataataaaaaaggcaatgtagctgcgttttgcttttgcacagctagcctttacaagccaggtgtatttttcgccaataccttcaagccagctattaaacttaacaaaaaccttattctttgagggggtactaggttttaagaaaatcgcacataaagcggggctcaaggtcaaagcaactaaggttgatatgagcacggcaacggtaattgaaatcgcaaattcacggtacataatgcctgtaataccggctaaaaacgacaccggcacaaacactgccgcaagtactaaagacgttgctactatggcacctgaaagctctgtcatggcttgtttagtggcagcaactacctccatattttgctcattgatcagtcgctcaacactttcgaccaccacaatcgcatcatcaacgacgataccgattgccaaaaccatagccaataaactgacattgttgatggtaaaaccaaatgcagccaaggcgatataagtaccaattatcgacactggcacagctaaagcaggtatcaaggtcgttcgccaattttgcaaaaataagtacaccactaaaatcactaaaactagtgcttgaataagggtattgatcacctcattaatcgacagcttgatgaactcagaggcatcataaaaaagctgccatttcactcccttcggaaaagccgcgctcaagcgctccatctctgccttaacacgctcagtaaccgctaatgcattagagcctggcaacatataaacctgtaaaatagtggctggttgttcattgagttttgagtttaaggtatacgcagaggaagccagctcaacccttgcgacatcccgcaagcgaatcatcgagccatcactattaactcgcaacataatattattaaactcatcaaccttattaagccttccttgcgctcgtaccggaaagttaagtttaatggcatctttcataggttgtgcaccgatctcaccggcagcggcctctttgttttgtgctttgattgctgcactcacatcattcacggttaattcatagcccgctaaaatgtcaggttttaaccagacccgcatagcataagagcgcgagccggtattacgaactcgcccaacaccaggtacgcgctttaaagccgcctcaacattaatgctggcatagttactcaagtagatttcgtcatagcgagggtcatcagatgtcagcgctagcttcaaaagctcgactgagctttcattagacactgtcaccccttcagtttgcacatcaacaggtaaattactgcctgcttggcttgcagtattttgcacatctacaagggcgagatcagggtcggtaccaacatcaaaggtaagtgtgatcccaacactccccgagttagtggcctttgactccatatacaacatgtttggcatgccatttaattcttgctcaagtggaatagctacagattcagatgcggtttcggcggttgatcccggaaatgaagccgacactttaaccgatggcggagcgatatcggggtattgatcaattggcaaagtaaaaagcgagactaagccagtgagtaaaataactagcgaaataacaatggcaaacaccgggcgcttaataaaaaaatgcgaaaacataattaaactccctgcgctttatttttatcttcctgttttgcaggtttatctggggcgagcagttgatgatcggcgtttggggttagttgatgcttttcaaactcctcgagtgaaatcgctttcacttgttggccatgacgaatacgatgcaagcctttaaccacgactagttcacccgcactcaagccaccgctgaccacaataccttgctcaccataatgctcaacaacaataaagcgccgctctatcgcacctgaatcaagcaccaccatcacataaataccaccctgttcaacttgtgtagcttcctcagggacgacaatggcgttactgatctgcgacaactttatgcgcgctttagtatattggcctggtaataattcactgtcgggattgggtaattgtgcccgtactttaaaggtgcctgttttcgggctaatcttagggtcagtaaagctcacatcaccccagtagcgatattcgctgccatctggcaaagaaatacgcacgaatccttcaagcgctttacctttttgttcggcttgtagctgatccatcaaactactcatacggcgttttgcgtttaagtaatccagtgccgacatattaaaattaacgtagataggatctatttgctgaatagtggttaacaaagaaataccgttagtgccgactagcgcacctaaatcagcttcagagctacctaccatgccactaattggcgctgtaatgcgggtatattcgagttcgagcttcgtttcttcaagctctgcttgggttgctgataatgacgcttgcgcttgctcttgaatagaaatagcgttgtcgtagtcgagctggcttgctgcatcttgctcgtaaaggggttttaaacgagttacatcccgtttggctttagccagcgctgcttggtctttttgcagcgccgctttaacgcgattaagcttggctcggtaaggtctatcgtcaatggtatagagcaaatctccttcatcaacccagcttccttcgacaaactcaacactttctacaaagcctgtgatccgcgcgcgtacttcaacatccagcgacgcatctgtgcgtgccacgtagtttccgtataatggcacatcaaactgtttgaccttagcagtaacaacttcttcaattacctcgtttggttgctcttttgagcaaccaacaagcaccattaccaacacatatcctatgaggtatttgtttaatagcatacaaccttctcattccttaagcctgtctctatcttgctatctgttgcaatactacatagatgagggattcgttgttatttttgacaattagagcagtacactgtgcttctttgtcctaatctaatttcttttaatggctcctcgcaattaacacatggctcacctttgcggccatacaccagtaattgctgggcaaaataacctggcttaccatcactttgagcaaaatcttttaacgttgtgccgccttgcgtgatggctgcagcgagtgtctctttaataataggcactaattgctgataacgctgcaaagaaaccttgccagcttctcgctttggatggatccccgctttaaataacgattcattagcgtagatattacctacaccaactaccaccgcgttatccataataaactgtttaatcggtacttttttgtttctcgactgttcgtaaacacgctgtgcaacaaactcatctgttaatggctccggcccaagcttactcagcaaagtatggcattcacctggcgcctgccataaacaagcaccaaagcgacgagcatcgttaagccgcaacgctttacctgaagccaaaataaactcaatatgatcgtgtttattcaatggttcatctgcattaacaacacgcaaattacccgacatccccaagtgcaaaataacactaccgagctcacagcctagtagtaaatattttgctctgcgctcaattgatgtcactttaaggccttgtaattgatagacatcatccggcactggccaacgcatgctcgcattgtgaatatttactttagcaacagtttgacccagcacatgtggggtgatccccaaccgactcacttcaacttcaggtaattcaggcatctgagactctcttaaaacgggtataacggaaataacttagcggcatcagcttgctcaagcacaaacacccgctgtaaccgcttatctaataaataatatttactatctatatggtacaactgataaacagcaggcaattgctccccggctaaccacacagaagcaacataatctgctgacgactgagaaatttgactaacaggaagactggcaatagtgagtttttgatgttgccaaagctcaacgagttgttcgagctgttgttcatcgccttgccaagaggcttcttgcaatgactggctacgccaagaggtgccgatacgctcaatttttaattctggaaatgccatcgccaaaatgaagctttgctctgggagtaacgcttgcactccttcttcaacgggctgagtattgagctttttatgtaggccattgaagaaaaaaatcatcagtagcatcgaaataatcaccacattattccatgcttttcggctcaaacgcatcagtatcttcctcagttttcaatatcttaaagtgtaaccaaaaaggacattaattggcagttgtaattgatcaacaaaatttcatgtctgttatgtatcaatctgtcgatactttgctaaaatatccgccaaatttaaaggagttccgtcaatgtcaatgtatgtagtgggtcataagatccctgattcagattcaatttgcggtgcaattgcgcttgcttacttaaaaaaccagatcaatgaacctgcgatcccaacgcgtttaggtgaagtatcacctgaaacacaatttatcctagataaattcggtttcgaagcacctgagctaaaacttagctacgcaggcgaagacgtttatatcgttgaccacacagaaaaaacacaagcacctgatgacatcgatgaagcacgtgttgtgggtgttgttgatcaccacaaactaggcgacttaacatcgtcaacaccacttgaatgttggatccgcccagttggttgttcaaacaccatcatcaaaatgatgtatgacttctacaatgtagaaattccaaaagatatcgcaggcatcatgttatgcgctatcctaagcgacactgtgatctttaaatcaccaacttgcacaacggctgatatcaagtgtgttgaagcacttgctgaaatcgctggtattgaagatttcaaagaacttggcatggaaatgttcaaggttaaatcagcagttgaaggcacgccagcacgcgatttagtaatgcgtgatttcaaagacttcaatatgaacggtaagctagtaggtattggccagctagaagttatcgaccttgctgtatttgatgaaatcaaagcagatcttgaagcagacatcgcaaagcttaaagaagaaggcggccgccactcagtattactcctgttaactgatatcatgaaagaaggctctgaaatgctaattgcgtctgatgacgtagcagtaatcgaagctgcttatgatgttaaatcagaagacggtcgcgtttggttagatggtgtattaagccgtaagaagcaagttgtaccaccactacaagacgctttcgcaaaaatctaatttgcaaaagactgtttagattatctatacagcttattccttaatgttaaaggttcgcttgtgtgaacttgagcgcatttagcgaaataaagtacaatggataaattaaaggcttgggttagcaatagtccaagcctatttattttttattagagacagatcatggcgcaaactcgcggaaatttatttatcttatcggctccttctggtgcaggaaaatcaagtcttataagtgctttactaaaaaaacacaacgatatgaaagtgtcagtatcacacacgactcgttcacctcgaccaggtgaagaaaacggtgttcactatcattttgtttctgttgaagcgtttaaagcattgatcgagaaaaatgacttttttgaatgggcgcaagtttttgataattactacggtacttctaagcaagcaatcgagagtcagttagacgctggaatcgacgtatttttagatattgactggcaaggtgctcagcaaattcgtaaattagttgatgatgttgagactatctttattcttccgccgtcaaaagaagaacttgaatcacgtttaaataatcgtggtcaagattcacaagaagtaattgccggacggatggcaaaagcacaatctgaaacttcccactacaatgaatatgattacgttgttgtaaacgatgactttgaaactgcactttcagaaatcgaaacgatcgtgatggctaaacgtttatcgttaaaaagccaaactgtgcgccatcaggcgctattagagaacttacttaaataatacttttttaagaataagataaaaattaaccacaagctattggcgaatttaacttggtacagtaaactacgcctttgcttaagaatttatttggagtgctaagatggctcgcgtaactgttgaagatgcagtagatgcaattggtaatcgttttgacttaattttagttgcggctcgtcgtgcccgccaaatcgcggttggtggtaaagatccactcgttgatgctgaaaatgataaacctactgtaattgctctacgtgaaattgagaaagggttagtaaatagctcgtctatggacctgatcgaccgtgaagagcaacaacatcaagaagcagcagaaatggctgctgttgctgctatcgttggtggcaaccaataatcaagcgccctgctttgatttagcttaacggctagtatttcaacactagccgttggcaagcccttcttttcatcgtatattctattcataccgttaccgatttacttcatttgcgcattggagtgtgactttgtatctattcgaaggcctaaaaaagaaaataaccgaatatttgccacctgctgaaatagagctggttcaaaaagcatacgtggtcgcccgtgaagctcacgaaggccaaactcgctcaagcggcgagccttacatcactcatccagttgaagttacacaaatacttgccggcatgcacttagaccatgaaacactcatggcagccctgatgcatgatgtgattgaagataccgattttagccagcaagacttagcagaaatttttggcgagaccgttgctgagcttgttgaaggagtgagtaagctagataaactcagctttaaagataaaaaagaatttcaggctgaaaattatcgaaaaatgatcatggcgatgacccaagatattcgcgtgatcttaattaaacttgctgaccgaactcacaacatgcgcaccttaggcgcacttcgcccagacaaacgccgtcgtattgcccgtgaaactctcgaaatttatgccccgatagccaatcgcttaggtatccatgatattaaaaacgaattggaagatttaggttttcaagcgttatacccaatgcgtcatcgcgctttgaaatcagaggttatcaaagcccgtggaaaccgaaaagaagtcattagcaatattaaaacagaaatagaagcacgcttagaagaatcaggtatcgacgccaccatttctggccgagaaaagcatctatatagcatttacaagaagatgctaaataaagagctgtcatttaacgaagtgatggatatttacgcgtttcggatcaatgtcgataacatggatacctgttaccgcgtactaggtgtggcacataacctttataagccaattgaaacccgctttaaagattatatagcggttcctaaaaccaacggttaccaatctttacatacctctttggttggcccgcatggtattcctgttgagattcaaattcgcactcacgatatggatcatatggcagacaaaggggtagcggcacattggatgtataaaaaagccggtgataacgcaggacatactgcgcaacaacgcgctcgccaatggatgcaaagcttacttgaactgcaacaaagtgctggttcatcatttgaatttgtagaaaacgttaaaactgaactcttcccagaggaaatttatgttttcacgccagatggccgtatcgttgagctcccaatgggagcaaccgctgttgactttgcatatgcagtacatacagacgtaggtaatacctgtgtgggtgcaagagtaaaccgtaaacctcaccctttgagcaaacctctcgatactgggcaaactgttgaagtaatcaccagctctggcgcgcacccaaatgcgacgtggctaaactttgttgtaactggtaaagcacgtttaggtatacgtaactatctgaaaagccaacaacatgaagaagcgatgttgcttggtcgccgtttattagattctgcacttggtgagtcaaaattagatgacatcccagatgaaaatatccgtcgagtattacaagaacataacctaaatactttacttgaattactcgtagagattggttcaggtaatcttatgagcgtattaattgctaaacgcttgatgcaagacgatgttgaagatataaatgacatcgccaaaaaagccaaagcaacaatcataggcacagaaggcatgttagttaactattctaaatgctgccgccctgtaccaggtgatgccatcacagctcatatcagccaaggtaaaggcctgactgtccatcgccaagaatgtaagaacattcgaggctgggaaaaagaacgctcaaaatacttagttgtaaaatgggacgataacccagaaaaagaatatatagccgctctgcgtattgagatcatcaatcatcagggtgcgctggctaaattaaccaatgttgtagcctcaacccaagctaacatagttgagatagccaccgatgaaaaagaaagcaatttatacatgatagacctaggtatcacggttaaaaaccgtgttcacgttgccaacattatgcgccgcattcgcgtgatgcctgatgtgcaaagagtctatcgtaaaaagtaacaaggataattatgaacaaatcatttatttctactgataatgcgcctgcagcaatcggtacttacagccaagcagttaaagtaggcacggctgtttatttatcaggtcaaattccattagtgccagaaacaatggaagtgatctcagaagactttactgaacaaacgcaccaagtattcaaaaatttatctgctgtttgccaagctgctggcggtcaaattcaagatatggtgaaagtaaatatcttcttaactgacttatcaaactttgcgattgttaacgaagttatgagtcaatacttcaagcagccttaccctgcacgcgctgcaattggtattagcgctttaccaaaaggtgtgcaaattgagattgacggtatcatggagctgccttcaacaaactaatcagctatgccagcagctatttgttgctggcacttttattgacaaatttctattttacctcatccgaaattcttgactcaccaacgattctctagcaatctgtatagtaaaggtattcagatcacctcaaaatgtcatagtttgcattttaaataggcttaatatcaacgtattactttgcctttgttggcaatttatttgaagaagtaccaccgataaacattaggctcaaagaaatgttcaaacgattggtttaaaagcgatttatattgcgttattgatttttaccattatgtgaatcaaaaccttattagaagtgcttgaataccagttagaagctaaatttttgagatggtttgggtttactaagtaaccctttcactattgttgtataaaaggatctccacgtgtttaagctcgctcacaatggcaacgttttattagatgttcatgaacattcgccaccaagtgctgcatttatcatcgaagcacttgagaaatcaccttatagtgagtgccgagttgatcacgactctattaataacttttttaaaagtgaatcgaatgagcgtacgctcgttgttgcctctaaacatgatgcaaccctagaagtaaaaataagtgatgacaaaatgcaggcgataggcgaattaacagtcgctgaaggcggcaaagttatgagcttagaagacgccaaaaaagagctaataaaagcaggtgtagcacgaggttacaaacaggcatttttagaaaagttattacaacagcaatttgaattaccagcaggcaccaaaacagaaggtgttttagcaaaaggccgtcttccaattgatggtcagccatccaagtttgtgccacaagtcgaaacactaaaagatcgcctaaaaaaaccaaaacttcgcgaagatggcactgttgatatgcgtgattttggcaaattagccagcgttgagcccggcgtgctgttgattaagcaaattccagcgactccaggaaaagaaggctttactgtaacaggcgatgtacttcccgccaaaccgggagagagcctcactttggtcgcaggtgaaggcaccgaaatctctaaaaacaacccactagaacttatttctgtcattgcaggtgtgccggttgagatcgccaacggaatgcgcgtagatgatatttttactatcgccgatgtaaacgtaaagagtggtcacgtagactttgaaggtagcgtcattgttactcacaacgttgaaccgggcatgcgtattaacgccaaaggcgacattaccgtaatgggcaccgttgagtcaggtaacttatccgccgctggcaacatcacaataaagcaaggcgtcattggccatcagctagaagataaaagtctttcctgtaatattatttgccaaggtgatattcacttatctcatggtcaatactgctacttagaagcgaataatatccttattgaacgtcaatctagccactgtgtcatgaaagccactaagctgttacaagttggtcaagaagataacccgcagggcaaactgtttggcggtgagattttagatgcacaaatggttattgctggtgaaattggcaatgaatctggcgcaaaaatgttaataaacttagcagcatcaggtgccgacgtcaccgcacaaacagatcaatgcctaaaggatcttgcgcagacagactcacaactcgacactcttcaagaagcaatagaaaaagcggatcaagtaaaagatgttgagaagaaaaaactattactcgctaaaataggtgccacacaaatgcattactgtgagcaagctgaaatgttagaaaaaaaactatcaacgcttgagaaccacctacatgacttacttgaagacgcaaagctcattgttaataaaacactgcactctggtgtagaaattcatattttcgacaaagtattgcgtacaaaccgccaatacccaccgtgtaaggtcaagcttgaagaaaacaaggttgaggtagagttcaaaaccagttaataaaaaagaggcttaaagcctctttttaccagggtcattaatcttaatttaaagaattccttccacttgctgttttagttgttcaggccaaacacctacttgtacttgtccaatgtgctgcttttgtaacagcaacatagccagtcgagattggccaataccaccacctattgtttgcggaaactttttcgcaagtagctgtttatgccaatcaaactctaagcgagcctgatcgccagtaatcgctaactgagtagctaaagcatcagggcttacgcgaatgcccattgaagatatttcaaaagcatcttcaagcacaggattccaaactaaaatatcaccatttaagcctgcaaatttgctgcatgtttgcgttgaccaatcgtcataatccggtgcccgtacgtcatgaattttaccatcggcgagtgtgccgccaataccaattaagaataccgcaccgtattcttgcgccaccgctttttcacgttgtttcgcagtaaagtcaggatacatctggcgcaactgctcactatgtataaaggtgatttgctcaggcaaaaaaggcgttaaatcaaattcactcgctacaaagcgctcggttgctttaatcgcctgataaagtgatgtcacagtttctttaagcttaccaagagtacgctccgtgctctcacaaattactttttcccaatcccattgatcaacatacactgaatgaattgggctaagtgactcttcatcagggcgaagtgctttcatatgcgtatagagcccctcacctactgaaaaaccgtaatcagccaaggttttacgcttccacttagctaaagaatgaactacttcaaattgactaccaggaattgtttttactgcgaccgagacagcattttcagtaccacttagattatcttgaataccatcgcccacctttgccaagattggtgcttgtacttcaactaaccctaattgttgttctaattggcttgaaaagaactgttttactttactaatttgctgctgttgctgcagatagtgtgaactcataataattggcctcattcccagttattgttacttgctttatgagaaaagcccgctgcttggctttctccgataaagcaatcctcaactaaaccaagttttttttcaataaccatcaacaaaaagaacttaacattgaaattttcataaaaataatgctataaaaattactgattcaacaattagcaacaagaaatactatggaaaattatcaaatcgataatctcgataaaaacatccttaacgcattaatggaaaatgcgcgaacagcgtatgcagaacttgctaaacgctttgctgtgagcgcgggtactattcatgtacgagtcgaaaaaatgaaacaagcaggtattattacaggcacccaagtaagtattaatgctaaacaacttggttatgatgtctgttgctttattggtattaacctcaataacgcccgtgattatccgcacaccttgctgcacctaaaagagctagaagaagtggttgaagcctattacaccacgggaaattacagtatttttatcaaagtaatggctcgctcaattgatcacttacaagatgtactgatcaataaaatccaagcgattgaagccattcaatcaacagaaacgctgatctcacttcaaaacccaattagccgtgctgttgttccctagggtataatcagcgccaattagaatccgtcaacgagcacacaactatggatacaactcgctttgagcgtgtaaagcgcgtgttagatcgccgccaaacggacctaacggtttgtttagaagaagtacataaacatcataatttatcagccattgcccgcacagcagatgccacggggtgtcatcatgtacatgcagtgtggcccgataaccaaaagtggttaactaacaatacctcaggcggtagtaagaattggcttgaaactcatttacaccgcaatattgatgaggctgtagccacaatgcgtgcccataatcctgaggtacaaattttagcaactaatctcagtgatgatgccgttgattttcgtgacattgattacaccaaaccgacagctgttattgttggtcaagaacgagatggaatttcacctcgggcacttgaacatgccgataagcacatcatcattccaatgcaaggcatggtgcagtctcttaatgtatctgttgctgctgcacttattctatttgaagcacagcgccaaagagaagtagccgggctctacgaccgcaatatgcttgatgctaaagttaagcatcgtattttatttgaaggctgccaccctattattgctgagcaatgccgagaaaaggaactgccttatcctgagcttgatgaaaacggcgacattattgctgatgaagcgttttggcataccttaaaacatacgcaatcgcttgatgcctctaacgagtgcaagtaaactgaaaaaatagtctactaattaacaatttgagtcacctttgagtcaccctagcttagcgttatacccaatcacagaattaaaaggcgtcggcccaaaaatggccgagcgcctcgctaagctaaatattcatacggtgcaagacatgctgtttcatttgcctcaccgctatgaagaccgcacccgcattcacccaatttgcgaactacaaccgcatagccatgttagtgttgaagccaccattgaaaccagccaaatcacctttggtaaaagacgtatgctggtttgccaaattaacgatggcacgggccgtttaacgctgcgattttttaactttagcgcagctcaaaaaaatgctttaagtgcaggtaagatcattcgctgctttggtgaaatacgccgtggtcgtgttggttttgaaatgacgcaccctgaatacagcctatcggataccccttcagagcaacctacaaataccacgctcacgccggtttatcctgttactgaagggctaaaacaattatctattcgcgcgcttagcgaacaagcgcttgcgctattgtctaaatacccggtagaagaattactgccagaacagtttcaaccaaccggaatgagcttagccgatgcgttaatgaccttacatcgcccacaaaacgatgttgatttaaccgcccttgaacaaggtatgcaccctgcccagcaacggttagtgtttgaagagttacttgcgcaaaatttaagccttttaaagttacgccaaaaagggcaagccgtaaaagccgtccctttaaagccccataaccaacttgagcaacagtttttagcaaatttagccttcagcccaaccaacgcgcaaagtcgtgtcgtggcagaaatcaaaggtgacttacaacacccgtttccgatgatgcgcttagtacagggcgatgtaggttcaggtaaaaccttagttgcagcactcagtgctctcaccgctataagcgaaggctaccaagtagctttaatggcacctactgagattttatccgagcagcatggcatcaactttagccaatggtttaatcaattaggcattgaagtcgcttggttaggtggtaaaagcaaaggtaaagagcgcgcaaccactcttgaaaaaatagcctcaggggaagcacaaatgattgttggcacccatgcgttattccaagagcaggtcgagtttaataatctggtgctaatcatcatcgatgaacaacaccgctttggtgttcatcagcgcttatcactgcgtgaaaaaggccgttttggtgactgttacccacaccaattagtgatgactgcaacgcctattccgcgtactttagccatgacagcctacgcagacttagaaacctcagtaattgatgaattaccaccgggtagaacgcccattacaacggtggctattcctgatgcccgtcgagacgaaatcattcaacgcgttaaaaccgcatgtacagatcaaggccggcaagtgtattgggtttgcaccctgattgatgaatctgaagtgctacaatgccaagccgcagaagatagcgcagagcaattaaaagcagcactacccgaactaaacgtcggcttagtacatggccgaatgaaagccactgaaaaacaagccattatgagcgagtttaaagcaggtaatattcatgtactcgttgccacaacggtgattgaagtgggtgttgatgtgcctaatgccagccttattattattgaaaaccctgaacggctggggcttgcacaactccaccagctgcgtggtcgtgttggtcgcggggcaactgcatcacactgtgttttactttatcatgcaccattgtcagccacagcgcaaaaacgcttaggagtgctgcgtgaaagtaatgatggctttgtgattgctgaacgagatcttgaaattcgtggcccaggcgaagtgcttggcaccaaacaaacaggcctagctgaatttaaaattgctgacctaaaccgcgataaacaaacactcgaccatgtaagacccattgccttcaaaatattaaacgactacccaacacttaccgataaattgattcaacgctggcttgctggcaaatcagactacgcacaagcttaatcgcaagtgtctaataccaatccgcaataatacttaatcattttgagggattaaacctgtcgctaactgcgttaaaaatttcctactaaacaataaaaaagcccagctaataagctgggctgacaagttagggagttatccaagggttggattagaacttgtattcaataccaacacctaagtaatcttggtcaacttgattatctgtatcaaacgttgagtagaaaccaaatactttcgtgtttttgctaagcttgtgatcaacacctgcagagatagctgttttcttatcgccttcatcaaagtcaattacttggtattgtactttgaaagtgttgctattcatttggtaagcagcatttactaagtaaccatcagcttctgcactaccatccactttctcttgtgtttggtacatagcacctagtttgaagtcaccaactttaccttgcactgttgcacgaacaatgtcgtaaccttttacttcgctgtcagctgcaattgatgcataaagtttgctttctttaagttttgcatcgccgtaagttagcgctactgagtaaccgttatcagcatctacatcatcttcagccacatacgttgctaatactttgaagccactgaaatctttagaagcataagaaattgtgtcacctaaacggttttcgcctttgaaaccatttttgatatctgcttcaaggtcattgaataaatcaattttaccttgagattgcttcatagctgtatcgttacgaccgataacaacctgaccaaagctgcctttaagacctacatattggttacgtgcagtgatgttgtcatcattgtcgccttttgaatcagcgtcagatacgtcaacaccaaactcaaatttataaaccgcttctaagccttcagagattttctctgagccttttaagccaaaacgtgagttattgcttttaatctctgtgaaagacccttcgccatcatctgatgattgaacagtcacgtttgctttaccatatacatctacatcagctaatgcagaaaaagataagccaccaaataaagctaggaataagctagactttgcaaatttcatgtcgtttcctcaataatcgcaacaaaaaacacatgttgtgtttcaatgcgcgcagtgtgacagcgaaaaatgacagaaagatgacaattgaaacaaaatcgtcaatttagcttcacgaaatataattatttctgaaataaaaacgtaacttactgtttcacggttaagtttttataaaagctaatttaaataaattttaagtttttatttgcagctcagttagtaaggttaccaacttttctaaaagaggtgtctgttcattatctctgtggtaagcaacaaacacatctcgcgaggtatgagcaacatcttcaacatggtataaatcacccgcttttaactgctcttctactaataacttaggaataaacgcactacctccgcacttcaaaattaaatcaagagcaatacgtcctgtgctggttctaaagtaaggaggcgcgtggccgttaaactcacgagcatgccacaaagaaaaggtagtaccccaatcaacataaacatattgattgtcgaaaaaattttcgctgttagctgtttcaaaagcactcacaggaatgattggcagctcacaaattcgttcaacaactagctcatccactttaggaggatcaaacagtaccgctaaatctaatgtacgctctaatagtaagcgagtgctttcttgttgtgcttttacttcagcgactaacgatacacccggcatggcagaaacgatatttgtgatcccaaactgtaaaaaagcatcccaaatattaggtgtacctgctaaactaatttgcttatgcatattatcagcaagcgccacatcaacttttgcacgttgcatgccggtaatgatcatttgcgcatgtggcagtaatcgctcacccggtgctgttaactgaatattgttacgttgacgaataaataagttaacgcctaaaccttgctctaactgcctgatccgaaaactcactgcagactgcgtaatatataaattttcagctgctttgccgaaatggcgagtacgaaccacttcgacaaaagtcttcaataaatcgatatccattttttacccttacgataaaaataacttgtttaataaaatcgacaacttgatccatactcctgcaagaaattagggcatgaggataaagccatgagcaatgacatttcatcacttcgtcaggcatttgcaagccaacgtcaattttatgatgatcaaaacttcccacgcggttttggtcgtagtggtcacttcactttgctagaagccgacattctcgaacagcatggtgttgtattaaagggtttatacaacaaaaccctagaaccacaaaatgaatttcaaactcaatttgtgcaagttgttaccggtaaccttgaagcaacaaacccagttgaacgcgcttggatgaaatacctaaaacaaacaacctgtaaaacgaagtttcacactttgtttggtcgttcacgtattgccagtcctacaccgcaaagtgttgagtattattctgagtcagatagcttataacgatttgcttttttacccttttagggttaaaacttgtaataacttttgtttcgccaataagttattacaaggcaagctgtgactcgaagaatactaataattgaagatacgccaaccattgcgcgagtgcaaaaacatatcgcgcaaaaagttggctatgaagcagacattgcaggtaatttagccgaagcaaaaaagcttataagtgagcacaattatttttgtgctgtggttgattttattctcccagacgcacctttaggtgaagccgtcccctgcaccatcgcagccgatataccgactattgttatgaccggtaaccttgacgaaaccacgcgtaatatcgtcgaaaagcacccaatcattgattacattaccaaagaaaataaacaagcctatcaatacctagaaaaacaactggcgcgtttacctcgcaatgagcaaatactggtgttagtggtcgatgattcaaaagcaactcgtcagctaatttgtcatttattagctcgccacaaataccagacaattgaagccgttgatggcgtcgatgctctcagagtattagctgaaaacccaacaatttcagtgataataactgataacgaaatgccgaacatgagcggtgctgagctctgtgttgaaatacgccgtttatactccaacgatgaaaaagcaattatcggtatttctgcttatgatactttgcatctatcaacgcgttttttaaaatcaggcgcagacgattacctacgaaagccatttaataatgaagaattctactgtcgactaagccaaaacgtcgacatgcttgaaaacatcaaaacgattcgtttacaagcaaataccgattacctaactaaactaccaaaccgacgttactttttcggtgaagcaaatagacatttaaaagccgctaaacaagctggctcgtcggtatcccttggcatgatcgacattgatcattttaaatctattaatgataattatggccatgatgcaggtgatgaagtgctcaaagcgttatcacatcacatgacccaatattttgcagataatttagtaggccgctttggtggtgaagagtttgccgtgtattttgcagatcaagatccagaagaagcattacaacgcctagaaaagtttcgcgcttttattgaaaagcacagcccagagtttagtaaagagcaaattcattttactttatccataggctttcatcatcagcctatttacagtctagatgaactgattaaacaggctgatttaaagctttatcaagcaaaagagtctggacgcaataagttagttagctaaagcctaaacaggctttgtcaccgcttctaattgcgcctttcgttgtttacggctttgtcgatacgagtcccaactaaatagtgccagcgcactccaaatgcacgcaaaggtcactacacgctcagcatcaaatacttcaccgtaaaaagccactgcaagtataaacattaaacttggacctatgtattggaaaaagcccagcgtgctgtactgcaggcgctttgcggcacctgtaaaacataacagcggcaaggttgttaccactccggcactgatgagtaacaggttaatgtgccaatcattcgctgttaaatcagagcttgctgaaggcgccatcaaccaccagtaaataagcgccacaggcaataaaataagcgcttctagcaataagcctggtaatgattcaattggcagctttttgcgtaataatccataaatggcaaacgaaccggctaatgagaaagcaaccacggggaatgaaccaaagctcacaagttgaagtaacacaccacaaagtgctaaacctaccgcaacgccttgccatttacgcagtcgctcacctaaaaacaacataccaagtaacacattgagcaatggattgatgtaatatcctaaacttgcatcaagcatatgattattgttcacagcccaaataaataagccccagttaaagcctagtaaactggctgttatcaccaacatcagtagtaatttaggttgcccaagcacaatacgaatacgctgccattgatgacgagctgcgataataagaagtaaaaataacaccgaccaaataacgcggtgcatcaagatttcaaatgcagatatttgctgcaaaaacttaaagtaaatgggtgcaagaccccacataaaaaaagctaaacatgcgaaaataaccccttttcgctgttcaatattggtaggcataagcttggctttgtaggttaaaaaccttattttacgcccactaagcagtgacgcaaccaaaacgcgttaaataaacccatgtatttacttctaaaaagggactgccattgttgcaaagtaacgccttgatattaagcacctgtgaaacgcttaattctgcatcttgaggtcatttggtatattgctaaagacatcgccttaaaaaaccactaaaatgctcggcgatgaataccaataccgcaatgtccaacacacccgttcgatcaccacacgccgtactcaaacaagtgtttggttacaaagattttcgtgatggccaagaagcgattatagccgcagcgctagacggacaagactcgcttgtacttctgccaacaggtggaggcaaatccttatgctatcaagtcccagcattaatcctcgatggtgtgactgtggtcatctcgccacttatttctctgatgcaagaccaagttgcccaactaagagcgcttggcgtacaggctgcatatattaataacagccttccctttgaagagcagcaagcggtgtatcagcaattgcactacgggcaaattaagctgttgtatgtggcgccagaaaaagtgttgcaacatgaatttttagaacgtttaagtcatcttaatttagcactttttgccatcgatgaagcacactgtgtgtctcattggggccatgactttaggccacattattgtcgactcaacgagttaaaacatcgctttatgcatgtacctatgatggcacttacagcgacagcagataaggcaactcgttacgatataatcgaacagctccagcttaaccaaccgtatgtgcacacaggcagctttgatagacctaatattcgatacaccattgaagaaaaattcaaacctatggtgcaactgcttcgctatttaaaagagcagcagaatcaaagtggcattatttactgcaccagccgtaaacgggttgacgatgttgctgaaaaacttgctgatgcaggttttaatgccgcagcctatcatgcaggcatgagtaacgagcaacgccaatttgtgcaatcaggttttgcccgagacgatattcaaattgtggttgcaacggttgcatttggtatgggtatcaacaaaccaaacgtgcgctttgtggtgcattacgatattccaaaaagcattgaggcctattaccaagaaacaggccgagctggtcgtgatggccttgccgcagaagcgattatgtattttgatccagctgacataggccgcgtacgccgtttttttgaagatattgaagacgagcaacgacgccgcgttgaagaacagcgctttaatgcgatggccagctttgccgaagcacaaacatgccgcagacaaattttactcaattattttagtgaatataagcgcgaaacctgtggcaactgtgatatttgcttaaacccaccaaccagctttgatggcacactcgttgcgcagcaagcgctatcttgtgtgtatcgtgccgagcaacgatttggtattggctatattgttgagctactacgtggtgcaaataccagccgcattcgtgataataatcaccaccagctaagtacttatggtattggtaaagatcacagtgtggagttttggctaagtattttaaggcaacttattcaccaagggttattaagccaagatattacccaaggttcgtcattacgcttaaccgaagccgcccgtgcagttcttaaaagtgaatatgcattacaacttgccgagcctcgcttacaagccaagcacgtataccaagataaactcgcccagtttaattacgataaaaagctatttgctaaattacgtgccttacgtaaagaactggctgatgcggatgatgtgccaccttatgtagtattcaacgataaaacgcttgctgagatggcgcaacttatgccaactaatgatagcgagttcttaaaagtgtcgggtgttggttttactaaactaaataaatacggcgcaccatttttaaatactatccgcgactacttagccgcaaactaggactaccatgactgaacttacttttgatgcagaacatgcagtcatcattgtgcaagcaagcgagcctcctcatgacgaagattttgaattatgggctaccttgtttttacatacacccgcaataaaaattgccgactttgatgctggagccgatcgacatcagttaagatttcactttacagatcatagttttaatctaaactttgaacattacagtgaaagtatttggataaatgctgagggcgtagaagctacagagatattaggcgagctttatcagcatttagtcacacagttacaataataagctagacttttttccacgcttagtatgtagtgactgtataggaaacaatcaactaagggtgtaaatgggttttaagcagtcgcacttcgttgctctactaattttgttgccattgagcttggtaacaaacgtgtatgcagaacagcaagacatagacgatagcaactattgtcaaaatcagcgcacactaaaatcccaagataacaatttgcgccgccaacttgataccgataacccacttccgcaggctgctgaaggcagcaaaataacttctataaaacttgagcagctcaatgtatttaataccgagcttgaagaagaaaataactttttatttcgctttgctaatcgtgctcacatgaccactgagccggatgtaatacatagcgttttactgttcaaagaaggcgatgtttacaatccacgtaaattactagagtctgagcgactgctgcgtaaacaaggttatttgtatgacgcccgtattaacgccaaacttgactgtaacggaaatgtacacgttaatgttgtcacccgcgatttatggaccttactgccagaaataagtttcagccgcagcggtggcgaaaatgagtcaagccttggatttcgcgagtcaaactttttaggttggggtaaacgcgtgtcgttctcgcgtacgcatgatgctgatcgcaccggttacctatttgtttatgatgatcctaatatcttttcaagccgctatcgtgggcggctagaatattccgataacgacgatggtaagcgtcattacatcgatgtaagttacccgtttttttctatcgatacaccttatagttatggcgcaacaagctactctgatgagcgccgcgaatcactttattatcggggagatgtggtcagtgagtttgaacaaaaaactgtattaagccgcgcttactttggtcactcatcacaacttgccaataattggacccagcgcataaaactcggcattgaaaaccgcgaagagacctttaaagctatttcacaaacgcgcttccctattgcagatgatcgtagccttagttacccctatgtgagtgcgcaatggtttgaagatcattacatcaaagtaagaaacttcgacagcatttatcgtaccgaagacctcaatcttggatggaatatccaagctcttcttggttattcaagcaaagactttagcgatgattcaagtcgtgccatttactcactatcattatcaaaagcgcactacagcggagataatcaactttggcgctttaaagccgacatagacggctattggaacgaagcccttgatgatgttgaaaatcttttcacaagcacgcaagtccagtattaccttaatacgactcttaggcaaagctggtatgctaaagcacgcctgcaatacgcaaaaaacctgaccgccgacagacaacttactctaggtggagaaaacggcctcagaggctacccgctcgattaccaagtaggcgatcgtagctttttagtgactttagaaaaacgctattattgggaatacgatttattgcagttattcaaagtcggtggcgcggcattttatgatattggcagagcttggtataacgacaaaaacaatggtgaaaatggcaatgtactacaaaatgtcggtgtgggtcttcgtttagcccctagtcgtgccaatgcaggaacagtaatccatctagatgttgccgcaccgataaataatcacgatgatgagatagattcagtacaatggcttgtgactgttaaaaataccttttaagctagtgttattcagcaactaacgcgctaaaatcggacgtaaattattagcttgggaacccctttggacttcgtcgaattttttaatgagcaatatcatttaatcgtgacaatcatcgcggttttgctctatccgctactacgtaaaaccaccaaaaaactgcttttaaaagccattaaaggtaaagctgatccgcaccgagagtaccgtgcagagctactccttaacattattttggcgatcgtaatgctatgcttagtattagttttttggggtatagaactgcgcggcttgttagtactaggctcatccatttttgccatgttgggtgtagccctttttgctgcttggtcgttactaagcaacctaacagccttcttgctgatgtttattcaaaacgattgtcgggttggtttttgggtgagagtaattgacggtgcaaacttcttagaagggcgtattatcgaaatggggttaatgaacgtggtgcttgagcatgttgatggccacaaagtcatttacccaaacaacatctttgttacccgccctgtaatggtgttaaagaccccacctacagcgactaaagcgccaaccataaagcgcattttagggcccaaaaaataaaagccgcaattgcggctttttttataaaatactttaacggctaattattcaaatctgccgttttcaactcgtcttcaatatcgcttatttcatcaataaagttttcaagttgttgctctacaatactatttgcatgagcaaagtaagcaagatggaatacagcatccccttcgttcacaagcggcatggtttgttgaccaatcacaataccactgcgcggagcgagtagctcaagctcagcatcaccaagtgggctgctgatataagctaacacttgccctttcattactcgctcaccaagtgatacttgtgcacgcacaataccgtcaacttcggcgcgcacccagcttgttgagcttgcaataaccggctctggtagcttcttagctcgcttacctcgtaccatttttaaatggcgcattacataatcaacaccttgcacacctgcagcaatggcaatagggtcaaagcgaagcgcttcacccgcttcataagtaattactggaatacctaaatttgccgcctcactacgtaatgaaccattacgaagtgacgcatcaatcaccgctggagtaccaaaggctttcgccatagctgccgttgcaggatcacttaaattagcacgaatttgcggcaagtttgtccggtgtatcgcgcccgtatgtaagtcaataatatgcgtacaatgcatagctacttgcgagaaaaatgcattagccatgcgcccagctaatgaaccgcgggttgagcccggaaagctacggttcatatctcggcgatcaggtaaatagcgtgatttgtgaatgaatccaaatacattcacaatcggtactgcaataattgtccctcgcagttgctcaggctcaatcttagccagtaattgcctaacaacctcaacaccattgagctcgtcaccatgaatggccgcacataccattaatactggtccttgctgcacaccattgacgacttcaatcggaatatttaacggcgaatgggtataaagcttagcagcttcaatagaaaatgttttacgttcgccaacccccaccgtatcacctaaaattgaaaacggtgtatttttcttaaccttagccacgcactgttccttttaatagagcgcttattttcttaacctttaccacgagttgcagttctttttgtagcggctgttttctcaataaaattgatgatcatgccagcaatgtccttgcctgttgcgacttcaatgccttcaaggcctggtgatgaatttacttccatcactaatggaccacgtgcagaacgaagtaaatcgacacccgctacgttcaagcccatcgctttagcagctgcaaccgcagttcttctttcttcaggcgtaatacgcacaagtgtcgcactaccaccacggtgtaagttcgagcggaactcaccttcttgagcttgacgcttcatagctgcaataactttatcacctagtacgaaacagcgaatatcagcaccgccagcttctttgatgtactcttgcaccatgatattggctttcaagcccatgaatgcttcaattacactttctgctgctttgcgtgtttcagctaataccacaccgataccttgcgtaccttcaagtagtttaattactacaggtgtgccacctaccatgcttaataagtcttttacgtcatcaggtttgctcgcaaagcctgttactggcatacccacaccttttcgcgagagtagctgtagtgaacgtaatttgtcacgtgaacgggtaatagcaacagactcgttcacaggaaatacgcccatcatttcaaactgacgtaataccgcacaaccatagaaagttactgatgaaccaatacgtggcacgatagcatcaaaatcttttaaattttcgccacgataatgaatttctggttgctctgaattaatgttcatgtaacaacgtagtgcatcaatcacttttacttcatgaccacgctgttctgctgcctctatcaagcgacgtgttgaatataaattttggttgcgagataaaataccaagtttcatagttaaaaccttaactgtttaactcatacacattaaaaatgtgtcataagtcctttttataataagtgtgataaagccggatcaacgactatacgattttccattgctgtgcgccctagcaacattctaaacttcatcgttgcacggttacttaaggttactcttacaggccagctttggtctcctgcaacgagttttgtttcaataaagtaacgaagttcacgctgaccactcgaactggtcacgtacttacgctcaacgatttttgcacgacacaacactgttgtttctacatcttcttgcagaggatgggtactaaatttcacccagttttcgccattttctgaaaattcctcaatatcaaacgcatgaatacaagatgtacgcgcacctgtatccactttcgctttgatcttctcaatgcccagttctggcaagctcagccactcacgccagccaactatcatttttgcggtcattcatgtgccctctttaaaaaagtgtcttatacgctacagcgctagaaacaccaacgaaatatatttatcccctcgataaatcgatttcattaatatagtcttgactatactaatgtatatactcaactatatcgcactatttgtaaaatgagagctcaatatgatcaatgggttacttcatgtcttaatcttagacgaacaaggcggcgcacgtgctattgacaatagtactgagctgcaaaattggcaacctgcacacggaaaactttgggtccacatggactacagtcaggccgatgcagtgcagtggcttgaacaaagtaacttattaacagattacgaacttgagtcccttattgctgatgaaacacgccctcgcctaactaaagttaccaacggtaacatgctgtttttacgtggtgtaaatttaaaccccgcgcaaagtccagaagatatggtgtcgttacgtttattcatcaacgagaatgttattgttacaacgcgtaaacgccgtttattatcggtgcaagacgttgttgaatcgttcgatggtagtaatggcccttgctcaatctctgaattagtgtgtcaattagcgcaaaacctaacgtctcgtatgcaagcggtcatcgatagccttgatgacacactcgatggctttgaagatgaaatagatgaaccaaacaaaggctttgatcatcaatcgctagcgcaaattcgtcgtcagacaatcgcattaaaacgttatttaagaccacaaaaagaagcacttattactttgttaaacaacaaatataagtggctagatgaagacgataaagcacgcttaaacgaaacaaccaatatgttgatccgttatttagaggagctagacagctcgattgaacgtgcgcaaattattcaacaagcgattaccagccaagtgtcggagcaactaaaccaacgcatgtatgtgatgtcggtggttgctgcactgtttttaccacttggcttcttaacaggcttactcggtgtaaacgtgggtggaattccgggcactgaaagcccttatgcatttagcttgtttattattttcttgctggtgctaaccgttggaattggcatttactttaaaaataagaagtggctataacgcgataacctttttaattaaatcaaggcggacggcatgttcgcctttttttgtcgccaaaatcaggtgctcgccatctgagttaactattttgagtgtctcagcccttccctctacctgttcaccagatactaaggtaatactcaataatgatttatgcatgcaccataattcgtacttatcgtagtcgccacagtctatgggttgataggtcattttacttttgagttttattaaagagtaaatcgagcttagaagatattaaagtgaagagcaaatggcgctctcggcagggatcgaacctgcaacttagcctccggagggccacgtgatatccatttcaccacgagagcacatttgtcgtcgccagtactgactcgcgatatcagcatgacaacccggcaatgataatggcatctgtcattaaatgctagcgccgagctctctatatgcacataaattcagcaatttgcattaaaacacttcactttcgggcagaaccaaggtattaacgtatacttagtaaaattaataacaaggtggcatccattgccgcataaggggaatttgatcatgagtttaatgtctacagagcaagtggcggaatttttaggtgtcaaagttgaacgtgtaaaacgccttgctcgcgaacatttactgatctctaaatcacaagatgacaaaggtgagcctttgtttgatccagaagacgtaaaaaaatataaagagcttgccgagcgaattggcggtctttagtttttaacttttaatatgaagtggttaagctgtgtaagcagtggcgccactttgtccatcgcaccacgttgttcataccagcaaatacataaaagtaaaaacagtgcatgaaacgctgcgagcttttcaactgataagttaaactcgtgatggtcgcacacaagcgcatggtaacttttaagtaatgctagttgctgctcgtcattcagtgcaaaactcaccaccagcgccgctaagtcaaaataaacatcgttacttttggcatattcaaagtcgatcaaaaacatacctgattcattcacaatgatattttcttttactaaatcattatggcaaaagcccatatcttttggtgctgaagcaatataagccagtgattgattaattagatctgcgtgttgctggtaacggggtgtttgctggtaatagttaatttcgtaggcaatatccataggctcggttagcacaggataacgatgtaaattcactaaatcaggcaataagctactacagaactcaccgcttgcaatgctacctgccacgtattcaaaaatagccgtatcggttgcttgctctaaccaaagcggtgcaggacagcagctatgctttgcaaagtgcgtttgcgcagcaaggcctattgcaggccagtggtcgcgataatgcttaaccaagaagtctttatttgaggtttttactaagtagttgtcattgcttaatccctcaaccagcgggctgattgagataataattaaatgggggtcaaaacgcgcaaacaacgcgtgaatttgttgctcagttttcatctatagctgtgcaagcggcttagcctgatgctgctcgtattcttcgtaccaagttttaaagccccacgctgccataatggtgtaaaacacaaaaagcactaaagttgggtaataacctttttcaaagtacaaatacatcgaagctgcatcaatcacaatccagtataaccagttttccagtaccttcttagcaacaaggtaggttgtcaccacagcaaaacaggtggtaaaactgtctaaataagcaaaatcagcatgggtgtaattggtcatcacaaaaccaataacaactgaagctaatgaagtagcaagcaaaatcactgcatggcgcttcaacgaccaagaaattattggcagatgatctttattgttcatgccccggcgccaaactacccaaccatataccgccatatacatatagtaaaaattaagtagcgactccatcaacagtgcgccattccagtacatcacggtataaataaaagtgctcaaaaacgcggcaggccaacaccataggctttctttaatcgctaacagtaaatacgccatcgacaatgcaacggcaatgtattcccaatgcgacatggcagtaaagcctgagaaggtttcgctcaaaaattccataacacgcgctactttagagattagtcttcgttaggcgacaagtcaccatgtaagaatttacaaacaaaaatagctttaccaaactcttcatatgaacgtttgatttcagtattaagtacagacatcactaaatcataatcaccgaaaatctgtgtcgataaggtattggtgatcacttttagaccttcataactatttacacggtcaataaaacctttaataaacggaatataatcttggtgaagtggatacttgctgatctctactgaaagtttcatatgcgttaccgagtattttcaaagtattgcattgtaactcgcttatactaacaagtcatggctctggctattttttagtgtaaaatcagccccgataaacattgaggactcattatggcacgccgcatcacttataaatttaaaaaccaaccgcgcgaaatcaattttgctaaagataaataccgcgatatgtatcatgcgatagctgcggctgaaggcattgatttaacgaattatttaaagatggaacagcaagtcgaaatgacttcaaaaggttctgcagcagtgcgtaattttcgtgatcaagaattcgcacgaatgggctttagcgacgtgtattttattaaagaatagttattcttgatactcgtagcttactcgcggggtgatattacacagtaactcgtaaggaatggtggtcgcacactgggcaatctcttcaacaggaagctcaggcccccacatgatcacctcatctcctactttgatattgtcgtggttatcaccaatatcgaccgtgatcatatccatcgccacactgccaacaataccatagcgctgcgacttaataataaccggtgtgccctgctcggcatgacgcggataaccatcaccatagcccatcgcaactacggcaagcttagtggctttatcactacaccaacggccaccatagccaacacattgattagcctcaacatcacgaatcgcaataacgcgagtcgttaaacgcataacaggttcaagcccgtgctgttgaccaacaccattaagcattggcgatacgccatagagcatcaaccccgggcgtacccactcgccatgaccttttggccaagcaataatgccagctgagtttgcaaggcaatgctgctcgcttttaccatcagctaatgagtcaaacaaagcaatttgctgagcggtcttttcatcattgatgtcatcggcacacgaaaaatgcgtcattaatttaatgtcatcacgggcattaggacttgcttttaagcgactgtaaaaagactcaaattgcgatggtgcaatccctaagcgatgcatgccagtattaatttttaaccaacatgcaatcggtgcgtcaagcattgcattttcaaggctggtgagctgattctcatcatgaatgatggtttgaaagttattcgccagcaaaattggcagatcgtcttgatgaaaaaaaccttcaagcaatacaatcggttttgtcagtccaccggcacgtagcgctaacgcttcgtcaatgcgtgcaaccgcaaaagcgtcggcatcatttaagtattgggcaatttttactaagccatgaccataggcattggcttttagcaccgccattactttgcaaccaggcgcaaagcgcttcacttgcgctaaattatgggcaagtgcttgaaggttgatttcggcaatggctaagcgcattagtattcgtcatccatagctggacccgcatagttatcaaaacgcgagaattgaccttggaacgttaaacgtactttaccgattgggccgttacgctgcttaccaatgatgatttcggccacgcctttttcagcactgtcttcgttatacacttcatcacggtaaataaacatgattaagtcggcatcctgctcgatcgagcctgattcacgtaagtcggagttgattgggcgtttatcggcacgttgctctagagtacggtttagctgtgataatgcaataaccggacattgcagttcttttgccagtgcttttaatgagcgagatatttcagcaatctctaaggtacggttatcagataagcttggtacacgcattaactgtaaatagtcgaccatgatcatactaataccgccatggtcgcgggcaatacgacgtgcacgcgagcgtacatctgtgggtgttaggcccgatgcatcatcaacatacatcttacctttttccatcaacaagcccatggttgacgacaggcgcgcccagtcatcatcatcaagctgaccagtacgcaccttagtttggttaatgcgacctagcgatgccagcatcctcatcatgatttgctctgaaggcatctctagtgagtaaataagcacaggcttatcttgtgtcatagctgcgtgttcggctaagttcatcgcgaaggtggttttacccatcgatggacgtgccgccacgatgataaggtcagaaggctgcatacctgccgtcattttatcaaggtcggtataacctgtacttacaccggttacaccatcttgcggcgactgataaagctcttcaatcttatcgacggttttttctaagatgctatgtaagctttgcggcccttcagtactttttgtgcgttgctctgcaattttaaatactttactttcggcaaagtcgagcaaatcatggctggtacgcccttcagggctaaatcctgcttcggcaatttcgttcgcaacaccaatcatttcacggataacagcacgttcacgaacaatattcgcgtaagcatcaatgttcgctgcacttggcgtgtttttggcaatttcggcaaggtaggcaaaaccaccgacactacttaactgattatttttttctaagctttcagaaatagtgatcaaatcgatagggtcgccactttcagcaaggctcaccattgcttcaaaaattagcttgtgggtgcgggtataaaaatcctgtgcaaccactaactcagcaacacggtcaaacgcttgattatcaagcattaaaccacctaaaacagattgctcagcttcaattgaatggggaggaacttttaatgtgtcgacttgcttatctggtttggccataacttcacaaaacttaaattgaatggctctattctatcgacttgctaaggctgtgcaaatagtaaagcgggaaaacttcccgctttattgtaattgagtgaaatattgtaattgagtgaactgtaatcgttatttctgcttacgaagttcaatgcgtccgctaatcgtatccatttcgatgtctgcatcgccaccgttaatactaaattctaagtcgctagatgggccgtatttagccttcgttgctctgtcatcactcagctcattaacgattttaccgtttgcatgagcttcaatttcaaactttgccgatacatctgcagggaagtaaaactcggcgtcaccactgactgattcaaagcgaatattggcatctgctagcagcttgttgatgtgaacttccgcttcaccgtttactgtgtttatgcgtagctttttaattgcatcaaaggcaaagtcaatatcaccatttacgttctcaaggcgaacatcttgcgctttggtttttgattttatatcaccattaactgcagtaaagcgtaaggcaccctgcgagtttttatcgttgatttcaccattgactgtttcaaagcgaatatcaccgttaagatcatgggcatttacatcgccattgactgtttcaaagctcatgttgccgctaattttttgcactgtaatatcgccgttgacggtatcgatttcagcgccggcttcaagctctttagcactgacggttacattcacaccggcaaactcaagctcactgctttttggcatgtaaatggttaaacgtgaaccatcaccgttattccaaccacgtaagttacgcggcattttgacgataaattcaacacggctgccttccacatctaaacgataaccttcggctttatcatcaagctcaccttcgattttaagttgaggcttatcccagccttcaatgcgtacatcaccccgttgattttcaataaaaatacgtttatttacaggcacatcaatttgttcattaatggtttgtcctgccattgccatcagtggcaataatcctaatgttaaagctagtaatttcataattgtcactcctaaatcgtttgccacttcggtgcatgcaccttgttaattaagtccagttgctgctgataaacctgcgagagcatttgtaataaagctggattttcaggttcattctcaagtgcttgcttgatggcgctttctgcttcttctaactctttaagctgttgctgccaattatcggttaatgcaggttgattttgatactgcaccaataaactttgcttttgcttagtgaaataatcactcattgccatcatgctatttgattcaccttgaccgacaaaaagctgtacggtcaacagtgcagcaatacaacaagcagccacagccgcgagcttattccagccatgagttggtttctcaatttgctgcgtttgcggctcagcaattgctcgctcaatacccggccagagatctttatctgggctaatatcttgcttctggttaagcgagtcatttaaaaattgttcaaattcttgcttactcattttcataccactcttttaataactgccttgcacggtgaaattgcgacttacttgaaccaactgccatgtttagcattttcgctatctcttcatggcgatagccttcaatggcgtgtagcacaaagaccatacgtgctcgttcaggtaatctcagcaccaacttatcgaggccgttaaagccgtcgcaatctgcagcgctttgctcatccataccactttgttcaaaactcacgactttttgcagccaactcttatgtttgcgaatgtagctaatcgcaatattgctggtaacactatgtaaccaagtcgaaaactgtgagcgtccatcgaagttagcaattttatgccaaagctgtacaaacacttcttgcgtggcatcttctgcgtgctctttatctgcgagcaatcgtaaacaaaggctatatactcgcttcacatgcaactcataaagtgttgcataagcagcttgatcaccgcttttaacccgctcgatcaaggcatgctcactttgctggacgaacgcttgttctgcatctatcaacatcctggatgttgtcctttatgattattattgtgaatttagtgtattagacgtaagggaggattcaaaaggtttaaatgaaattaaattttttgtgtaagctacaaataattgagcttacacaattttatttgggggcttgcgttattcggcaggtgatgcgtcgcttttttctgcggttttgtagcgccaacctaaaaacacaatacgagctggagatgacggtgtcgtgccatttttaacctgtaacaaacttgcatcgtaatgggcaccactgccccctgtcgctgtgatacttgagccacgaacgctaccaaatagctcaccactaccagataattttaccgttgtgaggggcgcatatatcgcagcatataaattagcagctccactaaattgcactccattgatgccattaaatgttgaataaaatgacaatgaaggatgaccactgctggttaacccttcttgttcagtgatcacttttgctcccgcaccaatgctcactttgccggtgatcaacacggttaaactgctgtctttctttattgtaagagtcgtgtcgccttccattgagaagtcaccatcaaccaataaaataacatcaccaccagagacctccattttgccgtcactggtcatttttaatcggtctagtgcaaatatagattccttactattactaccgcttgtttttgtttgtggatttgaatcaaacaagaaaatatccgcaaacgtcggaaagataatttgtcgaccattttgactaaaaaaacctttttgagtgttcagcttgaattgctgtgttggcccaatcgaaacagcatcatagtcagtaacttcatcgagaatatcgaccattttctctggaagtataagtggatcacagttggtgtctgggttgctcggatcgtaatctggtgcactaggatctgcaacggtaacaggtgcaacatttgggtttacattaaacttactatcactgtaatgaacaccattttgctgattattataggtatctttaaagtcaccagttccaccatacataatatccagcgcttcaccttggttatttgtaataaacgtcgaccactgcattttggcatcgccattagctctaacaacacctgacacagtgccaccacgatgggtataatacccacccgtgtagacgttaccgtcaacacgtaaaccactacctggtgaaatatacaccccggtatttgaatgaatattacctataatcggtgatgaaccatttaagtagataacccctgtagccttaacatcacctcttataggtgaatgaccagacagcacaacatccgaatcaccagcgatggtcgatacatcgccatcattcgattttgtttcttcatagctacctttgctagagtcgtagctatcaatactgccactccccgataagttaactcctttacaacccaccatcgcattagtaaatacagagcttcctttagctccttgcagtgcaaagcgtgcaactagattactttgtgcatctccctcaaaacgctgacctaaactggcaatttctagttcaccatcggcatttttacttacactggcattaaacgtagcatcagcagcgataacgcccactcctgagacatcatttgttttattgatcaactcatcaactgcgagaacaccttctcgattaatagtttgctgcaataacttagcttgttcaaaaacgcctttctcggctagtaaacgactgtttagttttttctgaaaattaccacttaagcgctcttgtacaattgtttcgcgtaatgaactcagcaccacaatactcgccatgctggttaaaataagaaccgtaaaaagcgtaaaaccagcttgtttattaaacacgactattcccatatgctttgagtaaaattgcgttcgttaaggcaatatcgatgttgataccttgaccaaattgagttggtagatcccgtggtttgacacttatcgtgaccaagtcaccagataaactaaacgataatgcttcaataccagttagtaagcgttcggcaaccgctccatttaacgagcataataagtcgttgccatttaaacgatagatttctgtcacttgagacgtggtaatagagccgtcacaggcaataacgccacttggctgcgtaattgtgatcgtgctgttatctgcactaacgattggcgttaattgcgtttgttttatacttcgggtgaacactttacttgtgaagcgaatcacttcttgggcgttttcaagttctttacttaccgcaatcgtacttttaatagccgaataagataaactcacgcctgcaagtaaaaatgccccagctgcaagtgcaaccatcagctcaactaaactaaaacccttaccacgcttcatcattagcaagccgccgataaatcgggaaaactggcgtttaaactaatttggttttcggcgttatcagtcatacgtttatcaacccagccaacatttatttgcatatcgttactgtaagaagccggaatcgtcagttgatagtcgtttacttgtggcttaaggctttctctaaaagtggcatcctgaaacaaagcgggatcggttttttgaatttcacacacatgcggccataaacgctcaattgtgttttggccttgaataagtgacaccgtataatgaaaactattggtcgcatactgtaaagacttcaactgcgctgcagctaaacccaataacgctatccctgcaataacaacagaaatcatgacctctagtaacgaaaaacctgcttgtttcttcatgcacaccctcgctgtgaactttcaactaaccaattttgcccacttttaagtacacacatcacatagtctgtggtgttaacatgctcatcttgaatacgaatacttgcttgtctatcaacctcaccactggcactcaccgttaatgagaccaaattgacgctaacgccagcttttgtcacagaaaatgcttttaaaatagtatcaacaccggcttcatttaaagtcacttcccagcggttatcactcacaactaatcgaatcgacttatcgcgttttacagcttcactgcgtgcatatttgtaaacgttattgagttgatttgcggtagtaatgacgcgatcttgcaaaatctgctggctaaaagatggcaatgcaagacttgccaaaatcccaataacaccgagcaccactaataattcaactagggtaaaaccaactaaacgacgcaatttagttactcccaacaatcattggctgtcgcgctgtaactaccatcatggttaacgacaagctcaccacagcgatcgcccgcttgtgcagagcccgtattaggtgttgcttttaaactgtagccacggtttttaaaatcactcactgcaccagcagctttatcggtggcggtataagtaaaagagtaatagctagtatcttgcgttgtgaatgtattgggatatccaccatttcgcgaatagatacgctcaagacttgcactatattgaagtaattcttgttgaatatcagcgcgtcggctgcgctgcatatgctcagtataagcgggtaatgccacactgtagagaatacctataattgctacaacaataagtaattcaactaatgtaaaaccacgttgcttaccttgttcacttaacacgagcgcatttaacaatcttaatacctctaatacttttttgttaaaacaatataaatgacagcgttgtcagtgtcaattttaaccaatttacctttattcatccgattatactaataagaagaataaaattaagaaaaaagaatgcttgtttgtaaaataggtaagattataggattatctattaggtatttaaagcgtgaaaactaataccatttaccgtaaacctatgagttgatagcggtacaaaacgctacaattaagcgtgtttaaggctaattcagaaagtggctattactcaaatttcaggcacaaaaaagccgcacctaagcgcggctttttttacttaatattgctattaagcttcagcgataacgattactttgatagtagccgttacgtctgagtgtactgcgattgctacgtcaaattcgccagtctcacggatagtacctagaggtaaacgaacttctgatttagcaacttcaacgccaacagctgaaatagcttcagcgatgtcgcgagtaccgatagaaccgaataacttgccttcgtcaccagctttagaaactagtgtaacttcagctaatgcttctaacttgtcagcgcgagcttgagcagcagctagatcttcagcgatcttagcttctaaatcagcacgacgtgcttcgaaagtttcgatgttagctttagttgcaggaactgccttaccttttgggaaaaggaagttacgtgcgaagccagatttaactacaacctggtcacctaggccacctaggtttgcgatcttgtctagtagaataacttgcatgtctctacaccttttaaaaactgttaatccgctgcttacttatgtaagtcagtgtatggaagaagggctaagtagcgagcacgcttgatagcagttgctagctgacgctgatatttagcgctagtacctgtgatacggctaggtacgattttgccactttctgtaacatagtttctaagagtagctagatctttataatcgatttgttgtacgccttccgctttaaagcggcagaacttacgacgtctgaaataacgtgccatgagtaaaattcctcaaaaaattctttctatatgttgagcatgcaagaccaattggcttaagccgtttcgaccttcgtgacggtttaaaaaccccgtcacctgcacttggtgcccaacgtgcaattgttgagtctgttgttgcaatggcgtgccgctggcaacaacttgaagcctgacataactattacggttaaggtctgcttcaacttgcatcgatttatgttcaagaacaaaaatacaatgcggtataccagcagggctttgactatattttggggttttacatacaaccccagataatgtcagctgattcatataaggattaagcggttggctcatctttttgtctcaactgcaagcgccatgcttgaactcaaaacgattaagcagctggtgcttctttcttctcttctttcgcaagaggagatgcttcagttacagcgtctttagtacgcataactaagttacgaagcactgcatcgttgtagcggaaagtagtttctagctcgctgattacttcagtaggtgcttcaacgttcataagaacataatgagctttgtgaagcttgtcgattgggtaagccaattgacgacggccccagtcttcaagacggtggatagtaccaccagcttcagtgatagaaccagtataacgttcgatcataccagctacttgctcactctgatcagggtgaaccatgaatacgatttcgtaatgacgcatggatattccttacggttaatagagccttctaccgtttcggccagtcggtttaaggcaaggaattaaatttaataagccgaaatgagcgcgcattttacgcttagattgataattaagcaagataaaacagcaagccaagctagattattgtgctctaataagattttctaagcgctaaaaacaaaaaacccagccgaggctgggtttttgagattctgaaaactaaaattacttgattttagcttctttgaaaatcacgtgtttacgagctttaggatcgtattttttgatttccattttttcaggcatgttacgcttgttcttgtcggtagtgtagaaaaaaccagtaccagcagttgaaactaaacggatcttatcgcgcatgattcagttccttaaactttttcgccacgagcacggatttctgtaagaaccgcgtcgatgccttttttatcgataatacgcatacctttagtagtagtgcgtagtgttacaaaacgtttttcactttcaacccaaaaacggtgagtttgtaggttaggtaggaaacgacgtttagtcgcgtttctcgcgtgtgaacggtggttaccaaccgctggacgcttacctgtaacttgacatactttagacatgtctatatatctccaataacttcgctcgagcttaattttcccttaggccagtatttgtgccccgggataaatcgaagggcgctctttatacagcttatacaggcaaagatcaagtaacagatcttatccaatcagctcatgtgtaaatttgatagcggctaattataaagatcgaatgcccttagggaaagtaaaaactgcatttaaattaaactaatttctaaaatcgccctaaactgctcatttttaacacactctatagcctaacaagctttatataagccctctttcggcaaacgacacacaattttcacctcccactatgatgtgatccagcacatttatatcaactaaggctaacgcttgctgcaatttcgtggtgatcaatttatcagcctgacttggctcagctactccacttgggtggttatgggcaagaatcagcgccgcggcattattacgtaatgctgctttaacgacttcgcgtgggtacacagaagctgcattaatagtgccgtaaaaaagcacttcgtctttaattaattgattttgattatctaaatacagcaccataaatacttcttgctgcaaaccacgcaactgaatagttaagtagtcgtacacagcttgtggcgaattaaatagtgcctcgcgtttacattgctcaagcatatagcgccggcttaattcaagtaccgcttgcaactgaacatacttagcggcccctaagcccttttgtgcgcagaattcttgttcgctcgcgttaaacaagttttgcaatgtactatttatactgagtaaatgctctgcaagctcaatagcattcatgcccggcacgcctgtgcgtaaaaatattgctaatagctctgcatctgaaagtgctttagcacctttagcaagtagcttctcgcgaggccttgctgatagaggtaaatcggttaatggcattgcttcatccttaaaacaactatatcaatgactaaactgtactataaaacctagaaaatccagttttttcctgtcatgaaaaagaaaacttcatgctatcggtaaagatttgctatcgttagcccatatcgacaaaagttaaatttcacgtaatgactaaatcagtaaataaaaaaatcctgctaggtatgagtggtggtattgcagcctataaatgtgcagagcttgtccgccgtttaaaagatcaaggctgcgaagttaaagtcgtcatgaccgactcggcaaaacactttattactcctttaacaatgcaagcggtaagcggtgaaattgtttctgattcattactcgacccagcagcagaagcagcaatgggccatattgagtttgctaaatgggccgaccttattttagttgcccctgcaaccagtaatattttagcgaaaatggcaatgggtatggccgatgatttactgacaacacttctattagccacccctgcaaaagtggctgtagcacctgccatgaaccagcaaatgtatgcccatcctgctacacaagcaaatattgccacacttcgcgaacgcggcgtggctatttggggcccaggtaaaggcgagcaggcttgtggtgatgtaggcgcaggccgtatgttagagcctcatgagttagtcacgctttgtacacaacctgaagtagagccattacttgccggcaaaaccattactattacagcaggaccaacccgagaagccctcgacccagttcgttatatctctaatcacagctctggcaaaatgggttatgcccttgccgaggctgcacttgctttaggtgcaaaggtcaacttaatttctggcccagtgacaattaaagcacctgctaatgccctgcttactactatagaaagtgcagagcaattactcaccgcctcaatgcgactagccgtacaatcagatgcctttataggctgtgcagcagtagccgattaccgtgcagcagcaattcatgagcaaaaaatgaaaaaacaaggtgatgaactaaccctcaccttagttaaaaacccagatgttatcgcaaacgttgcagcgcttagcaaaaaccgtccttatacagtgggctttgcggcagaaactcaagatgttgcaagctatgcacaaggtaaattaaagaacaaaaatctcgatatgatctgcgcaaatgacgtatcaaaagaaggccttggctttaattctgatcataatgctttaacacttttctggcacaatgagcagctagatttagcgatgggaagtaaaaaagatttggccatgagcgtgatgactgagcttgccaagcgtttgtaaaaatgctggaaagaaactgaataaaacattaacataagcctctcatttgcacaaaaaatggcttgtctgactcctaagagcgcaagtaataaattataagaaaggaatggtcatgcctgcgacaaaaagaagtaatcgcaaagagcagattctgcaagcactcgcacaaatgttagaaaccagcccaggtcaacgtatcacaactgcaaaactagcagctgaggtaggtgtgtctgaagctgcgttgtatcgtcattttccgagtaaagcacggatgtttgagggcctaatcgagtttattgaagataccctgttatcacgcattaacctcattttagaaaatgagaaagaaagccaaacacgtgtgtacaatattttactgctattattagcctttgctgagaaaaacccgggtattacccgcattttgaccggtgatgccttgcaaggtgaacaagagcgtttgcgtgagcgtgtacaaggcctatttgaaaagctagaaactcagttcaagcaagtgctacgcgagcgcaaactgcgcgaaggcaaagcatttcaatcagacgaaaccaccctagccaacttcttactcgcctacgtagaaggtaagatgaatcaattcgtgcgcagcgactttaaagcaaaaccaagtgcacaatttgaaaaacaatggccagagttacaaaagatttggttgtagtgagttgttaggggaaagagtaaagttaacgagttgctttctaactttccccttgtaactttccccttgtaactttccccttgtaactttccccttgtaactttccccttgaaactttcccgtccaactccccaaacacgccacttatcgtatctactcgaattgttaatttaaaacgctacactgggtgcatcattttaaaaacaacgagaaagatgaatgaaagcgcaattatcacttttgagcttagccttggtgacaagccttggtagtgcacaagttagtgcgaaagaagctctgcaatttaaagacgtgtttgattttaaatacgcaaaaggcacccaactttctgaagatggccaaattcttacctttagtgctgacccatatcgcggtaatgcacaaggtcaggtttatacattaaacaataacaccctgcttgccagcgttgagcgcggtactcgccctactattaataaagcagcaaactgggtggcttttactcaggtacctaccctgcttgaaaaagaaaccaccaagaaaaaagatgagctaaaaaataacctagttttagtgaatactaaaaatggcgagcaacaaacgtttaacgatgtaaaagactacgcgttatcggatgatggtgtatggcttgcttaccgactcgataagaaagcagaaaaagcagataaaaaagacgaccaagaaaaagacgaaaacagcagcgaaatcaagccagacaaaaaagacaaaagctttgatttagtgcttgttaacctacaagacaaaaccactcacactgtaaataatgtatttagttatgcgatgagcagtactggcgagcaattattagcaagccaaagctacagtgatggtgccgacaaccaagtagtgttagttgaccttaataatggctttgcaactagcgtgttgattgatgagccaggtgtggttgcaaataaaattgcatggcaaccaaacagtaataccgcagcgctgttagttggtaattacgttaatgatgatacacgccgacgcgaccacagcttacagcttttacaaaacagcgcactttcaaccattaactctacagatagcagctggactatcggcaaaacagcatcattaacatggtctgaagatggcgctcgtttatactttgaaaaccaccctaaactcgctgcaaaagttgccttaaaagaatacaaagatgaagcctctttatatgatttcgataccattcgcgaccaaaaaggcctaaacgtttggcacaacaaagacgctgaaataaaaccacgcgaagagcagcaatggaacaaagccaataagctgcgccactaccaagcggtttatcatgtaaatggtcagcaagttgtgcagcttagcacaccaaacatgccagaggtttcgcttaatactcatcgcgaagctctattaggttactcagacctaccttacctagaacgtgttatgtatggcggtttttacgcagattacttcagcgtggatgttaaaactggtaaacaaaccgctatcatcagcgactatccgtttagaccaagccttgcgccaaatggccaatttgcagcatttttccaagacagccaagttcagctaaaagatttaggtaacaacaaggtttcaacgttatctaaagcaattaatgctatttttgccgatgataagcatgactacccatcacctcaaccgggttatggttttgcaggctggttaaacgacagcagccaagtactggtttacagcaaatttgatatttgggctttcgatgtcgcaacacaaaaggcaacgcgcctaacccaaggcaaagaaaccaatacccaatatcgtgttattaaactagataaagaccaagtgggctttgccaaagacgaaacattattgctaagcgcaaccaacctgcaagataagcaaactgaaattgccaagcttgacttagcaagcaataaagtaagcaaagtactatcgggtaaaaagcgctatgatgtggtgaaaaaggcaaaaaatgccgacaaatacctatttactgcgcaaacatatcagcaattccctgattactaccaaactgactttagctttaaaaagccacagcgtgttaccaacctaaacccacaaattagcaactttacatggggtgaaaaacctgagcttattagttacaaagggtttgatggtgaagatttacaaggcgtattaatcaagccagccggctacaaaaaaggcgataaggttccggtggttgtgtacttctaccgctatatgagccaacgcatgtatgacttcccgaaaatggaattaaatcatcgtcctaacttcccgatgtttacctcaaatggctatgcgattttcttacctgatatccgttttgaaattggtcatccgggcaaatcgtcaacccaaacgatgctcaatgccactcaaaagttaattgatttaggtattgctgatccagacaaaattggtttacaaggtcactcatgggcaggctatcaaagtgcctttatgatcacgcaaacagatatgtttaaggcggttgtatcgggtgcgcctgtatctaacatgaccagtgcgtatagcggtattcgcttaaaatcaggccttgcgcgtcaattccaatacgaaacagggcaaagccgcattggtaaaaccttattcgaagcgccagagctgtacatcgaaaactcaccggtgttcttcgccgataaagtgaatacccctattctgattatgtttggtgacaaagatgacgctgtgccttggcacgaaggggttcagtactatctagcgcttcgtcgcgcaggtaaagatgccaccttcttacaatacgaaggtgaaccacatcacttgaagaagttccctaatcaagtggatttctcggtgcgcatgatggaatactttgatcattacttaaaaggcaagccagctgctgattggatcaaaaacggcatcccttttattgaagaataagcaacaagctgattttcagcttaaagcacacctcccccagagccagcatttttgctggctttgttctataaaatcaatcaaacaatctgttttttcgattttatcaatcgatttaaaccccagtttgtaagtggaaagttaatcagaacaactctatatttcatccaacttctaactggagactacacaatgtttaaaaaatcaacgtcagcgttgtctaaagtcgctgttgcagtatctttactcgtagcaacaggcgtacaagcgactaacgacatcaaatcaaaccaattctggtggccagaacaattagatcttagccaacttcgtgcccatggcgcagaatcaaacccaatgggtccttactttgattacaaaaaagaatttttaaagttagacctaaacgcagtgaaagccgatattgagaaagtattgactgattctcaagattggtggcctgctgactacggtcactatggtccattcttcatccgtatggcgtggcacgcatcaggtacgtaccgtacttttgatggtcgtggtggcgcaggcggtggtcaacaacgtttcgacccactaaacagctggcctgataacgcgaaccttgataaggcgcgtcgcttactttggcctgtaaaacaaaaatacggtcgcagcatttcttgggctgacttaatggcgttaacaggtaacgttgcgcttgaatcaatgggcttcaaaaccttcggttatgccggtggtcgtgaagacgattgggagccagattacgtatactggggccctgaaggcaaaatgctaactgacgaacgtcgtgacaaaaaaggcaaacttaaaggcccattagcggcagttgagatgggcttaatttatgtaaacccagaaggccctcacggtaaccctgatccactgctagcagcagaagacattcgtttatcattcggccgcatggcaatgaacgatgaagaaatcgttgcacttatcgccggtggtcacagctttggtaaagcacacggtgcgaaaaaagcgacctgcttagacaaagagccagcagctgcggctatcgaagagcaaggtttaggttggaaaaacaaatgtggtaaaggtcactcagaagatactgttacttcaggtcttgaaggcgcatggacagtgacaccaacacgttggtcaatcaactacctacaaaacttgttcagctttgagtgggttaaaacgaagagcccagcaggcgcaactcagtggatccctgaaaatggtcaagcatctaacctagtgccagatgcacacattaaaggtaagcgtcatgcgcctatcatgttcacaactgatatcgcgttaaaagcagaccctgagttccgtaagatttcagagcgtttcttaaacgacccgaaagagttcgaactggcatttgctaaagcatggttcaaactaaaccaccgtgacatgggcccacgtgctcgttacctaggtgacttagtgccagaagaagtattaatttggcaagattacatccctgcggttgatcacaaacttgttgatagcaaagatatcgcgtcacttaaagcaagcatcttagattctggtttatctgtatctgaactcgtgcgtgttgcttgggcatcagcagcaagctaccgcgacacagatatgcgtggtggtgcaaacggtgcacgtattcgttttgctccgcaaaaagattggccggtaaacaacccgaaagaagtagctaaagtactgagcaaacttgagaaaatccaaactaagttcaacaaaaaagcatctgacggtaaagaaatttcactagcagatatgattgttcttggtggtgcggctgcaatcgaaaaagcagcaagcgacgctggtttctctatcacagtaccattcaagccaggtcgtatggacgcgtcattagaaatgactgacgttgaatcattcgaagtacttgagccaacagcagatgcattccgtaactactacagctcagcatggaaatcacctgctgaaatgttagttgagcgcgctgacttactgagcttatcagtaccagaaatgactgcactactaggtggtatgcgcgcccttaacgcgaatactgaccaaactaaacacggtgtattcacgaaaaaaccaggcacattaagcaatgatttcttcgttaacctactagatatgtcaacgaagtggtctaagtcttctgaagaaggtgtttacgaaggccgtgaccgtaagtcaggcaaacttaagtggacagcaacaccagtagatttaatcttcggttcaaattcagagctacgttcaattgctgaagtgtacgcatctgacgatgctaaacagaagtttgttgatgacttcgtagcagcatggactaaagtgatgacgctagatcgtttcgacctgcgttaatattttcgcaaccaacaaagccgctaagtatagcggcttttttattttggataaaattcgctcgacaatcctgtgttttaagttaaaaataacactttattattaatatcaagatgtaggcattaaggatgattgcacgcttatcacagctcattgttttctatttactatgcttaattgtgacagaaaacagctatgcggatcaggctaactctgtaatctctattaacgagcgcagcgttaatcttacgcaattcaacatgagctatttcatcgataagcaaggcaatactccattcactaagatacaaagtgaaaattttattaacagtaaaaatgagctcactttaggtactaacgcaaaaacgacctggtcaaaaataatcatcaaaaataactatagcgatagcttacgtttatttgttcacaaccccgatgcttaccatctagaagaggtgggattttacgaaacccacaatgggcaactcattaatcaaacagatgtttatttagataaatctggggtaaaagccaatatgtttggcgggagtgccgttttttcgtttgctttagcaccagctcagcaaaaaatcctttatgtgaaatctgtaacttactcacaccagtggtttactcttaatatatatgacgaagagcactctaaacgtgcattagtcggtaacggtaattacattgcgctactcgttggaatgatgcttgcgctaatgatatataactttttcttgtatttatcggcccgaaaaatcgaaaacatcgtatacgccctatacttgatttcaggcaccgtatgggtggcgttatcttacggtgtagcggcaaacttttttggtgtatttagtgcagagcttttccaactaaactcaaacttactcagtatgccaagctttttggtgatctttgtaatgctcattttcgagaccaagaaacattaccctaaagagcatattgccctttcaattatattattgttgcttgttggcgactttatctacagcttattcgatatcgttggcgcattaaagccagctagtagcttagccgcacttatgatgacggtgacatttggggtatctatttcgctatggcgcaaaggaaacccgctagcaaaatactttttacttggtcactctatgtttgtcattttcaatatgttggcagtgctttattacaaagggatcagtgaagctaacgtgatcaatagtcatggcgtgggaataggcattttactcgaagctttaatgatggcgtttattctctcataccgaattaaaacacttgaaaaagtaaaagcgcagcaaaaagagctcactcgcttagtcgacacagatccaatgacaggcctgtttaatcgtcgctacttcgatagaaaaagtgaagagttaattgcagcaacagccacaaataatcagccattatctttactgattgccgatctcgatcatttcaaaaatataaacgatacctatgggcacgatattggtgacaaagttattattgagtttgccaatatacttacagcaaagcagcgcaaaggggatatagcctgtcgctacggcggtgaagagtttgtattactgcttaattgtaaccttgaagatgccaagcaggttgccgaacgaattcgcaaacaagcacaagaaaccattattaatgttgatgatacacaaacagttaaatttacagtaagcattggtgttcacagcgtagcccacgccgcaactactataaaagaaacactcaccattgctgacaaagcattgtacaaagcgaagagtaatggccgtaattgtgttgaagtagcggcttagagaaaaaatcggtaagcggtattatgtaggtcgccatttatggcgacaatttttagcgagacagtccttataactattttcattatgcagccccctttattctgccattagatattactctaactttaaataaatatgacataagacatcctacattttagctccataaagggttctaagtgccatcaaatcgagttttgatgggagctttaacaggagagtcttatgattaaaaacaaagtgggaatattttggtatgttgaaaatacgctaatttataaagctattaatacagctaatttagaagtagacaccttgggcctaattgacagtccctttttacaccatgaagaatgggaagaaaacttaatctttgaacaatttgatatctatctgagcgagagcgattactacaacttcccaagaggcagggtcatatataatttcaacgaattagttacgtatatatacttagatagaaagctatttaaaaagcacatagtaaaaaaaattaagcatgcattttctttgtttgaggttaaaacaatatttttaaccgaccctcactataaatgctttaagaatatttaaagggaattagtttaatgtctacttacacacctgctgacttcaaaagattactcagcgagtttgaggaactgccaaaaaatcagctagaaatgagtattttcgatatatctggctatcctcactatgaaaatgtggcaagtaatgtactcgcattttatcttaatcctcacaatgaacatggtttacaagatttacttctaagttccattcttaacaaagttgccattgagggtaggaatctaaaaaatgttctagttagtcgcgaagaatctacattcaatcaaaagcgattagacttattaattgaaactgacaacttactaataggtatagaaaataaaattttccatcatcttaataatgatttaaatgactacagttatgcgctcaaaaaatgggctcaaccgaataatctagagatagtgaaaatagtattaagtataaaaaaagagcaaccaagtgatggttttgtaaacgtcacttatgaagaactatttactgagataagaagacgcatgtctaattatcaaatcacaaaaaacaagtggtacttttacttactagattttatgaatagcattgaaggactagctggaagcaaaatgaaaattgacgaaaatgatcagttttttctagataactttgaaaaaatagaagcactacttggagaaagaaataaattcttagccaaactcaataataaagtcgttgagctacaacaaaaaattgaaaaaccgcctcaatgcaaaaggcaatggatatactctaaatcctgtcttgttcatgactttgagtttttctcctacaaaatagcctttgatttgtttatagctcctagcggctggcaattacaactattcggtagagatgctgaatcaaagaaatatttaacgttcctttttaataccataccattaaaaggaactcagcagggctataaagattctagatacatacttgaagagttttgccttcatcaagatttatctacgatagctgccagcttattaaaaaggttcagcatgttattagagtcgcaagaaagagctgagatgaaaacataaatagagactatattgtgattatactttgattatttattagccaaaacttagatttcagtaatgtaggtcgccattcatggcgtcataaaaaaacgcgctagagcacgacctacaaacacctgctaagctaattcctagctcctaaaaactagcaactagcaactcaaatcaacaatactgcccagctgcaaagccgcagctccaggcgtattggaagttgtagccgcctaaccagccggttacgtcggtgacttcgccgatgaaataaaggcccggtgattttttcgcttcaaaggtttttgagcttaactcgttggtgtctacaccgccaagcgttacttcggctgttctataaccctctgtgccgttgggtttaatttgccaattgtgaatgtaatcatgtagcgcgtcgatttgtgcatgggttagttggtttacattgcaatcaggaattgctttgctgtcgtgcagcatttcaacaaaacgttttggtaaaattgtcgcaagggtattttttagtgacttttgaccttggctttgacgccaatcttcgaactgctgttttaaatcaagctctggtaacaagttaatatacaccgtttgccctgcacgccagaatgagctgatttgcaaaatcgctgggcccgaaaggccgcgatgagtaaacaagatgttttctttaaactgggtgccatcttcactggtaaccagacaaggaatgctgatccccgatagaccatcaaagcgatctttatcgtgctggtgtaacgtaaatggcactaatgccgccatggttggcagcactgttaaaccaaattgctcggcaattttataaccaattggtgatgccccaagcttaggcatggttaatccgcccgatgcgacaactaacgactcacattgatagctgtcttgttcggtaataacttcataacccgcatcggttttagtcacgctgagtacttcgttacgcagagtaatgttaacccccgcccactcgcactcagttagaagaatatcgacgatatcttgcgcgctgttatcacaaaataactgacccagtgttttatgatgataagccaagccgtgacggtccaccagctcaataaagtcatgctgggtgtatcggcttaaacacgattttacaaagtgaggattaccacacaagtagttgtctgggcttgcattttcattggtgaagttacaacgtccgccgccgctaattaatattttacggcccggctttttgcccatatcaagcacagtaacattgcgaccacggtagcctgcttgtgcagcacacatcaaacctgcagcgccagcgcctatcacaattacatctacttgggtcattactcatactcactaaaaaaatttagctgattataacaagttattttacatgaggtgttaactgtgaggtgtttttacaaaaaagataaaaccaaaaaacgaaataaagtaaaaactcaaaatctaaaaattaaaactttttaattagaaaagagcgaaaaacacacgaaaaaagcaccatttagccatctatacatttagttataaccaaaatagagacaaacataataaaacgatattttaacttaatttacaattattttacctttgtcccccttcgcgaaaaatatcgtggagattaacataacaatctagggatcattatgacaactaacaacaacttgaaaaagtgcgcaattgcactgagcttgactgcgttgtttgggacgacggcagcaatggcgactccaaaccaacttatgacaccatcgatgcaggaaacggcagcaaaactacaaggtcaagacggctttggtacgcagttcatcattaagtataaaaacaacagtgatgaaatgatgacgatgtcggcagcagaacaatcgccaactatgatgaacaaaaaggctcaaggctttgttaaaaacttcaccagtaaaaaaggcaaagtaaaagcccaatatgttcgtgcaatggcgatgagtaatcaccacgtaatgcgtgctgataaaaaactttctgctgaagaagcgcaagagttcatgcaagagatgattgcaacaggtaatgttgaatacatcgaaatcgaccaaatgttaaagccattcgcaacacctaacgaccctcgttataacgaccaatggcactactacgagcaagcgggtggtttaaacctacctaccgcttgggacacagcaacaggtagtggtgtggttgtagcggtactcgatacaggttaccgtccgcatgttgaccttaatgccaatattttaccgggttacgacatgatctctaatctgtctgtagcaaatgacggcggtggtcgtgatagcgatgcacgcgatccgggtgatgcaatcagcgctaacgaatgtggttacacacacagtgcacaaagctctagttggcacggtactcacgttgctggtacggttgcagcagtgactaacaatggagaaggtgttgctggtgttgcatacgatgcgaaagtagttcctgttcgtgtacttggtaaatgtggtggtttaacgtctgatatcgctgacggtattatctgggcttcaggtggttctgtatcaggcgtaccagcgaatgctaatcctgctgatgttatcaacatgagcttaggtggtagcggttcatgtagctcaacaacgcaaagtgccattaaccaagctcgtaacaacggttctgtgatcgtaattgctgcaggtaacgataacgataactctgcgaactacaacccaggtaactgtaatggcgttgtaaacgttgcatctgtaggtcgtgacggtggtcgtgcttactactcaaactatggtagcaacatcgatgttgcagcaccaggtggcgcacaaagctttgctaatgactctgaaggtgttttatcaacacacaactcaggttctactggcccaagcagcgattcataccactactcgcaaggtacgtcgatggcggcacctcatgttgcgggtgtagcggcgctaattaaacaagcgaaaccatcagcaacaccagatgaaatcgaaaacatcttaaaatcaacaacgcgttcattcccagcaacatgtactagctgtggtacaggtattgttgatgcggcagccgctgttgcagcagcatcaggcacaacaccgccaccaccaacaggtaacgtgttagaagatggccaagcgctcactggtttaagtggttcagctagcagccaaacattctacacaatggaagtaccagcaggcgcaacgaatgtaactttcactatgagtggtggaacaggtgatgctgacctttacgttcgtgccggtagcgcaccaacaacatcaacctatgattgtcgtccttatgaaggcggtaataacgaagtatgttctatcgataacccaactgcgggtacttatcatgtcatgcttaacggctactctgcttattcaggtgttagcttagtgggcgatttaacaacttcaggtactggcacaggtgcaccgcaagctggtggtggtacagtgactgatatttctgcaagtgcaggtcaatggaaacactacacgattgacgtgccagcaggtatggcaagcttcacagtaacaacgtctggtggttctggcgatgctgatttatttgttaagtttggtagccaaccaactacttcaagctatgactgtcgtccgtacaaaaacggtaacgcagaaacatgtacattcagtaacccacaagcaggtacttggcatttaagcttaaatgcatataaaaccttctcaggtctgacattggatgcacagtatcaaccttaatagttgatctccccttacccccagggacttttagccggactcacgtccggcttttttgtacttatatcaataaaacgaattgctattaaagcttttcgagcacagcttcagcgcggcttactacaaactctttgtcttgttcaacaaacagacctgttaccgtttggttttcaacaatcatcgcataacgctttgaacgtacaccaccaaaaccagctgtgtctttatctaaaccaagtgctttggtaaaacttgcatcaccatcagcaagcaaacgaatatgctcagcattatgagcttcaccccatgctttcattacaaatgcatcgtttactgatacgcagtaaattgcatcaacaccttttgcggtaattttatcagctaaagtaataaactctggtaagtgagcatttgagcaggttggtgtaaatgcacctggcacagcaaatagcaccacttttttatcagcaaataatgcctctgttgataaagtttgcatgccttcactggttaattcgctaagggttgccgcaggtaaagtttggccttgttcgatcatcgtgattccttgaaagaaaataagaatacagagtatatacccaaaaaattgaataccgcatgatttaaaggcaaacaatgcactacattgctcgccctttgaagagttataaacctaagctggttttaatggtatgcatttgctcttgtaggcgatgctgaatatcactaactaatgagtttgactcacctacctgccctttcatgctttgcattgattggctaaagttttcgagtaaggcattttgctgtttagcaagctccatagcatcaaatgctactttattggcatcttgcgcgttgccggctacgccttctgagttacgtttaagttcttgagcattttgtgtttgcagctcagcatcattagccagtgcgctaatttgctctgataccatcgttgagttttcactcaagcggttaagttggttgttaatatcatcaagcgagccttgtgtttgtctagccagctttcgtacttcgtcggcgactaccgcaaaaccccgaccatgctcaccagcacgcgccgattcaatcgccgcatttaacgccaataagttggtttgttcagcaatgtttttaattacttcaatgatttgaccaacatcatcgaccccttttaataattcttttaaactctcaaggccttgttcaactcgctgctctgtatgagagctcgccgttaacatactgtcggcaaaaccaaggctctgctccatcgcattaaaagtctgtttagcattatcagcgacttggctattaatgttatttacttgctcacctatatgttgaatatcgctcagtaaattttggttttgctctacctgagaatggctggcatcggtttgctgggctatggtatgtaagtgctcgctcatttctagcataaagtcattaataaccttaagcatttgtgctcgctcttctgcctcaccacgttgacgctctattaattgattaaaataactagcaatttcgcctacctcggttttcgggtttttactctcaatatttttaagttcattactttcaatcaagaaggcaaaaccatcacgcaattgacgcagtggattaagcacttggttacgctgcacaaaatacacaccacccgccaacactacaagcataccaatagcgacacaaaacacgataaatacttgctgtttaagattgctctgttcgtcttttagcttttgctcagcaccgagcacggttacagataacgcaccgatttgttcgcgtaatgcttgcatacccgtttgacgttgctcagcttgttcaagagtagatgccaaatcacggggaaaacgtttaggccagctacttagctctgctttaatatcacccgctaaatcttcagcttcttcaccaaaaaacaacgcatcttcttcaacttcactcataacacctaggttatcaaggctgtcgattttatctgcgagtgtgttcagtgttgtaactgtttgcgtaaggctgcttttagtatcttgatcatagttaagaaccaacttataagtatacaaagcaagtgatgtgacttcgctgtaatagtcagcggcaagttggtaatactcaagtgcaagcgctgtttgcggctctgctttcttagcataaccaattaacgatgaggcagaaccggccatttgtcttatcgagttatcaagtaaagccatttcgttaccagacaacttgcccaaagcgcgatatttaccattaatgtctttatctaattcagtgagttgcgtattcagtgttgctgctaactcattgggaagtccagctaattgctgtgctttaatcttactaatcagtgctgaggctttagttaagtactggctgtcaccttgctctaaatagtcatctaggtaactttttaaatcaattatgatggtgtttttaagcttgttataagcgttatcttgctgctctattcctattaatgtttggcttgaccaaaacaaggtggcagctaataaaatactggcaagagtaagtaaaacggctaatagccgagtaaatgatgacacgcgcataaacgatattcccaagtaacgttacgcgcatagaatattaaccttttatgacagtttaatgaaaaaccaccataaataaccatatgtaaaaatcaaacacatccaaaaatactagactcaaaccattgctgcttttacatatacatcaaagcgattcttcttggttttgatttgcatactaggggttttgtcattcaaaaatggcgcataatcgggtcgcttaaccacgactcgtttgcttgcaagtggataagcaaactctagtaaatcgtcggcatcactatcagccccaacaagttcttggaatacccgcatttcttttttaactagggctgacttttctcggtggggaaacataggatctaagtacacaacatcaggtacttcattacactgagccaataaagtatggctagaaccaaatactaagctcatgttttctttcatccatgagcctatttctgcatcgttataggcgcgttctaagccatcaaataatagcgcggcaaccacagggtgacgctcatgtagtatgactttacagccaagtgatgccaaaacaaagccgtcgcggccaaggcctgcggtggcatcaagcaccacgggcgtggctcctttattcaagcccaccgctttggcgatagcttggcctttaccaccaccgaacttacgtcgatgtgcggcagcccccgtgacaaagtctacatggatagcgccaagttttggctcatccttttttttcaaactcaagccctgatcgtcataatgaagcgaaaagcccgcattaagctcagcccacttggctaaaccaaaacgttgctctatggcatctaaataagtacgcatttctttaaaaggacaatgaattaccacgtataactccgagctattttattcggcgccagtatagcatggcttaaaatagctcgatatccgtttgtgaagtgatatcttcagtatgactaggctcagccattttttgtaagtttaccaataactcactacgcgattcgataatatgattaagctgatgtttaatgtgagttaaatcgtcgtttaaagaggtaaataactgctgagtttgctgcaattgctgtaaatacaaagccacatcgctgctatttaactgctcattatgttcgactaattggttcaattcagcaagctgaactgttagctgtttaacggcatgctctcgagagtcactgttttgatgcatttgttcagagagctcgttaaaagcattgcctatttggtttgcctgagtcaatgctcgctcgtttatttccatatcttgcactttcgcattagtcacttccaaaatatgcggaaacaaatctttgtagcggccataaagctgtgcatcatccaagggcatgtttttaactagcatcgatacttttgggtagttaatgatggtgcgatgactaaagtcaacaaagcgatttgactcacggtgttgttctaataactcttgctcaagtgggcatacgccacctttagcactacaaaacacgccaacatcttgataccaaaacgccaaaacaacatcgagctccatggggttaaaaaattcgaacatatactcagataaggctttaatatcatgtgcatgatagctttgcccgacgtaacgcatgatgcgccccatatcacctgaatctgtcattgcaatttcggcggtgatctgcgctcgctcaacatcacttttaagctttttcgagtgttggcgatactgatataacacgcgaatacgtgccataagctcttcggcattaaatggttttacaatgtagtcagcagcacctgcgttataccctttaacacggtctggtaagtctgatttacctgacaaaaacattactggaatatctttggtttcagggtttgcttttaactcattacaaacctcaaacccagtttttccgggcatctctatatcgagcaatattatgtctggattatgttttattgcttgtcttaacccttcatcaccatttttagcatggagcagtgtgcaaaagcccgcgagcgattcttcgatcacatgatgcacgtatttatcatcatcaatggctaataccagtttagacatgcttaattcctatatactcttttttagaaggatagtacgagcgtgtgattttgcgaagaaatattaataaaaaaagcgccttacggcgcttttatatttttatattctttatgctgcaatgccactgtgtctaagcaatgcatcaactttaggctcgcgccctcggaactttttaaacagctccattggctcttcactaccgcctttttctaaaatatttttcaaaaaggcttcacccgtttcagggttgaaaatgccttcttcttcaaatttagaaaacgcatcagcagacagaacttctgcccacttatacgaataataaccagcgctataaccacccgcaaaaatatggctaaagccatgttggaaacgattaaacgctggcgctttaacaaccgcggttttgctacgaacagcatctaaagttgcttgaatattacatggttcacccgctttataatcgtggtggattgtaaaatcaaacaacgaaaactctagctgacgtaacatttgcatacctgattggaagttcttcgccgcaaggagtttatctaataactcttttggtaacggctcatctgtttcataatgacccgaaataaagttcagcgcttcttcttcgtagcaccagttttcaaggaactgacttggtaactcaaccgcatcccatgcaacaccgttaatacctgcaactggcgcagcatcaacttgtgtcaacatatggtgaataccatgaccaaactcatggaataaggttgtcacttcattatgagtgaacagcgcaggcttattgccaactgctttattaaagttacatactaaatacgcaactggggtttgtaattcgccgtttgcacgtactttacgacccatacagtcgtccatccacgcgccgccacgcttgcgatcgcgagcgtataaatctaaataaaaacgaccacgtaaagtattactactatcgtaaatttcgaaaaaacgtacatcagggtggtaggtatcaaagtcagtgacttctttaacactaataccaaataaacgatttactgtggtgaataagccacttaataccttatcggcaggaaaataagggcgcagtacttcgtctgaaatcgcgtatttctcttgcttaagtttttcgccgtagtaagcgtagtcccaagcagcaagttcagtcacaccgtgcttatcttttgcataagccgttagctcagcaagttcttgctcagcttggggtttagacttatcggctaaatcttctaagaatgagaaaacttgctctggcgtttcggccattttagtcgccagtgacatgtcagcgtagctgttaaagccaagtaactcagcaagttcatgacgcagtgcaagctcctcagtcataatagctgagttatcaaactcacccgcattggggccttgatcagaggcacgtgttacaaacgcagtataaaactcttcacgtaactcgcggttatctgcataagtcatgattggtaagtaagatggaaaatctaacgtgaatacccagccatctagctctttactttttgcagtatcagcgccaagtgctaacgcagactcaggtaacccctcaagttcactttcatcagtaatatgcttttgccaagcgagtgtggcatccattacattgttaccaaacttagaagccagttcagataaacgtgcactgatttcgccataacgcttttgctgctcaggttttaaagcaatacccgacaattcaaaatcacgcagtgcattggtaatggttttttgctgggcagtagtaagtgttttaaattcatcactattatgaagtgcattgtaagcatcatataaaccttgatgctgacctacaaaggttgagtactcagataacaatggcaaacattgctcataagcttcacgtaactcatcgttgttaacgacagagttcatatgtgataccggtgaaaataaacgtgataacttgtcatcagcttcttctagcggcagtaccaagtcattccatgtgtacgatttagtcgccagtacctcgtctattttagtgcggcactcagcaatggctgcttttaacgctggcacgacatgcgctggtttaattttagaaaacggcggaagcccttctaaaccaatgagtgggttattttctgcaattgtcattttcgttctcaaattttatgcgaagatgattttgaagttggggcgaattgatgaaatacaaggggcttaaccttggtctttattatgctattatcaacttattaataaatcgattaattaataaaaatttatctatttttgaggacaaactatggctcagcattttgattacattgctattggtggtggtagtggcggtattgcctctgcaaaccgtgctgcaatgcgtggcgcaaaagtcgctcttattgaagcaaaacacatgggtggtacttgtgtaaacgtgggttgtgttccaaagaaagtaatgtggcatggcgcacaagttgctgaagcaattaatgcatacgcaccagactatggctttgatgttgagcttaaaagctttagctgggctaaattagtagaaagccgcgaagcatatattggccgaattcaccaaggttacaataaatacttagcaagtaacggcgtaacggttattaatggctttgctaaatttgttgatagtaaaacagttgaagtaaacggtgagctatacactgctgatcatatccttgtagctgttggtggtcgccctactattcctaatatcccaggtgctgagcttggtattgattcgaacggtttctttgagctaaatgaacaacctaaacgtgttgcagtggttggcgcaggttatattgctgttgaaattgcgggtgttcttcatagcctaggtacagaaacacatttatttgttcgtaaaaacaaaccactacgtacttttgacccatacattgttgatacccttgtcgatattatggcaaaagaaggcccaactcttcacactgagtgcacacctaaagaagtggttaaagaagacgacggtagcctaacaattcactttgaaaatggtcacagccaaaacgttgatgaagttatttgggcaattggccgtacaccaacaacagacaagatcaaccttgcagcagctggtgttgaagtgaacgaaagcggctatgtaaaagtagacgagtttcaaaacaccacagctaaaaatgtatatgcagttggcgatatcatcgaaaacggtatcgaacttacgccagtagccgttaaagcaggtcgtattttatcagagcgcttattcaataaagaattgcctgatgatttaaaaatggactacgagctagtaccaacggtggtattcagccacccgcctattggcacgattggtttaacagagcaagaagcaatttcgcaatatggtgctgaaaacgtaaaggtttataaatcaagttttgcagcgatgtacacagcagttactcagcaccgccaagcatgtaacatgatgctcgtgtgtgcaggtgataacgaaaaagttgttggcttacacggcattggctttactgttgatgaaatgatccaaggctttgcagttgcaatgaagatgggcgcaaccaaagcagacttcgatgctgttgtggctattcacccaacgggttctgaagagtttgttacgatgagataaactcgcgttgcgagttgcgagttgcgagttgcgagttgcgagttgcgagttgcgagtcaattttaaaaccttgtggtgctgccacaaggttttttattgggtaaatttggcaatgatttcagtacactatcaaagctcagaaatagcttgactaaaaatatgtttaagcaaatctaggtttaaattaacacctgcaatattcgcatcaatccactcttgctgagagattggaggccacgaaatcttatagccgatgctatataacatttcttcaaaaaagaaacgtagtactctgccgttaccttcacggaatggatgaagtaaattaagctcacaaaacaaatctgccactttttcaattagttcatcattattctgacaattcgatattgccggaagggttcgaaataatttgttagcttcaggctcaatacgcgtccaagtacaaaagcgggtattaccctttgagatgtcaacatccctaatttgacctgcccacacatataaatcttggaataagtgatgatgaaggtgttttaaatgctcaagtgagaacttagagagaggttgttggggggagtcataggttctatagcgttcagcggtaaactcagcttcggcttgatctaatatatccgattctcgaatacctaatagattaattaatacatcagaggcagggtagcaatatttatcttgagctaccccgtatttatcgcgcatatttacgcttcaattcagcaatacttttgccttcactattagttttcagcgttagaccttcatagcttaaactgaccttaaagttatccatatctggcgtaaacttagtcttttgctgattgcttgtcttagctgttttggtagccataacccctcctgtgatactaataattctaacttattcaggtaaaaattgccattaactaacttacttgaaagtacagctataagggagagtataggctattagaagcaataaacagtgctggcacaaaccttgtaactgttaataaagtaaccagttatagcaacaatttgcccttatttactgtgtaattaagcaattattacgcagtaaacaaggcatttttacaaggaggcactgtgtctaagtctgcaattttatatcgcatggtaaccgatgagcatatttgcccattcggtttaaaatcaaaagatttattagagcgtaatggttacgatgttgatgatcgtcatttaaccagccgtgagcaaactgacgaattcaaacagcagcatgatgtaaaaaccacaccacaaacctttatcaatgataaacgcattggtggttacgatgagttgcgcgacttttttaatctgcccgaggctggccaacaaggtaccagttataccccagttttagccattttcgctgtggctatgctactgagctgcggttttacttatgccagcggtgaggctttattctctgtgcagaacctgatgctgttcgttgcattatcaatggcggtactagcgatacaaaagttgcaagatttattcagcttttctaactcatttattacctatgacttattggcgatgcgcattgtgccctatgcctatgtctacccctttatcgaggcgtatgtagcgattggtatggtggctgaattacccgccttagctgtagcacccttttcactatttattggtggcataggtgcggtatcggttattaaagctgtgtatatcgataaacgagagctgaaatgcgcctgtgttggtggcgacagtaatgtgccgctcggctttatctcactgagtgagaacttatttatgatagccgcaggtatatggatgcttattactttttagcgttttattagtatttaaagtggcttaattaagtaattaagccactttaaacgaatggttaaccaccattacgtaaatcgcgctcgaattcactttcggtttttactggatgacaggtcgatttaacctcagcctttttactgtcgtcgtcatcggtgctaaaaatcgtatagctgtaatcggtttcgagttcaccacctagacactcatgctcagcgtagatttcattttcagccccatcaactacggcctgtgatgcacagcctgccagcatagcaagtgcaagtaaaattggaattgctttcatatcttgatcctataatgctatttttatttttgctgtaagcaataggttagctcacacaattaagttaacgacaaaagtacctttattgatacaaaatttgtgtaagtttttgtgtaaacagaaagcgaagataaatgaggcaggttaagagtttaacctgccatgtgatggagtcttttaagccgtaccacccacagtaaggttatcaattttaaggcttggctgacccacaccaacaggtacgctttggccatctttaccacatacgccaacgcctttatcaagggctaagtcattacctaccatcgaaatttgctgcatcacttctgggccattgccaatcagtgtcgcgcctttgataggttgcgtaattttaccgttttcaattaagtaggcttcagaggcactaaatacaaacttacctgacgtaatatccacttggccaccaccgaagttaggcgcgaagataccttttttcaccgagctgatgatatcagcttggctgtgctcgccacctaacatataggtgttggtcattcgcggcataggtaagtgagcatacgattcgcggcgcgcattaccagtagggtttacacccatcaaacgggcatttagcttatcttgcatgtatccttttagaataccgttttcaataagcacgttatacgcagctggtgtcccttcatcatctacgtttaatgaaccacggcgatcagcaatagtgccgtcatccacgactgtacacagctcagatgccaccttttgacctactttaccgctaaacgctgatgcgcctttacggttaaagtcaccttctagaccatggcctaccgcttcgtgtagtaacacgccaggccaacctgcgccgagcacgacttccatactaccggcaggtgcatcgattgcttctaggtttacttttgcttggcgaacagcttcttcagcgtattccatccaacgcggttttccatcgactaattctttaaaatagccataatctaaacgcgcaccgccccctgcaccaccgcgctcacgacggccgttcttctcaagtaacactgagcaatttaagcgaataagcgggcgaatatcggtggcaaaggtgccatcacttgcagcaattaaaacttcttcataaaccgccgacattgagctgatcacttgctcagcatccggcgctaattcacgaatatagttttctagttcacgaagcaggcttactttgtcatcattgctcatgctttgaattggttgatgcggcgcatactgctgtttagcagctacatcactgaacacctgaatcgttttgttttcgccagcattggcaatgctgcgtgctgcagttgcggctttatttaacgcttcaaggttaatcgcatctgagtatgaaaaaccagttttttcaccactaacagcacgcacacccacaccacgctcaacgttgtatgatccttctttcactaagccatcttcaagtacccaagattcgtggtgactcgattgaaaatacaggtcggcataatcaacttgatgttgatgaataaaagcgagcgttttttctaattcttctctcgttagttggctgtcatgtaataaatgctgttcaaccgtgttcataataaatgctctctaaatcgttgctgagactgcacaggcatgtcttggcgaattgtattcaagcggtttaaatcaagcccatggctgataaacccggtaccagaggcaagctcactgagcgtttctccccatggtgaaataattatgctgtggccataagtgtggcggccattttcgtgctcgccccactgcgctgcagcaaccacatagcattgtgtttcgattgcgcgcgcagctaataaaatatgccaatgagcagcaccggtgactgtggtaaaggcactaggcactaaaataagctcagctccttggcgctgcatggcagtgaataagccactaaaacgtagatcataacatactgctaagccaattttaccaaatggcgaatcaaccaccacaatatccttgccggcttctgtcgcatcagactctcggtaactgcgcgtagtatcggcaacatccacatcaaataagtgaattttgttgtattgcgcaaccacatcaccttggttgttgaataaaaacgaggctgctagatacttaccattttgctgcgacacaggcagtgtaccagccgctaaccaaatatcatgttgcttagataaatcggcaagtttcgctttataagtctcgctttcgtgacctaattgatagcttgcttggctttgcttactaaagatcaaaaagctctcaggtaaacacacaagcaatgggcgagttgcaggtagctttaataatgtatccgccagaaaagcgaggttttgctcagcattcatgcttgagcacatttgtactgccacaacttgtggctgattattagccttcattggtatctaaactcgctgaagatgcggcatcttttaactttaattggctagacgactgcggttggctttgcgctgcttgcggtaatgtcacttcacggctcttacgatctatttctttcactacagggtcgttcatacttcctgttactttaaagttgatctctgagatcactcgcgctgaatgaatcactttatcgatggcaagcgctgcaagcccgcttaccgggttgaccatccatgccacaataacgggaatactcgatgtcacctgcggggcaactgcaaggtcgtaatcaatttcaaaggtatttaggtctgtatgccctttaatcgttaaatcggcaggcacaccatcaagcttggtatcttgagtataagcaatgcccttttctagctgcatggtgccttgcatactgttatagaaaaaacctttagagaatacatctctaaaatcgagtttcagcttacgcactaacgaatctaaactcagtaatgaaaatactcgcgcaccaccatcacttatttctgcaaggtgaccttctcctaaacgccaatctagctctccagctaaacttggtacatcaaagctatagggtgcgccttgccatgctaaatcaaacttaatattggcgtctgaatcttttactgtggtggttaattcaaactcatcaaataattcaccaatatcatcactttctaaattaccactaaactgagttaagccatcggcaaattgcccttttgcgcgtaatacatgatcacctttatcaattacaagctcagagaatatcaacttattttgctcaccgactaaactgctttttactttgtctaattgatattggcctactttacaatcttcacaataaaactcgattgcaggtatattcgtaagccaacttaaatcctctggctcattcttatcagatgaaggctcgctttcatttggcgaaaaattcatccgtaagtagtcggtaaaaatttgaatcggcctgcgcgtttcaccggttggaataagtgcgtcagcacgtaattctttggcatttaactttaactctaagtctgattgttttggcgctaatctaaattcaaagtcattaaaatcaatattattcagtgcaagtttgttaaatttgccagttacattgttaaaagctggcatcacactaggcgcatcagacttaactttggtaagcgcaataatttgatcaattaagccaaaccaaggcactatttcggtttctggtaaatcgattgataccgcaaacccttcacgatttaaccctaaatcttgtgaccctaaaataaggtgagcattattaaacttctttttgccattatctaaaatcgcattaaaaaacagcttattatcgatattagccgtgattaaattagaaatatgatcaccttgcacaaccgcatttagtggccaagtttgttctgcatttttgttataaggtgcaggtagttggctagtaacccccactaaattacccgttatgtctgcacgataattaaagtcattaggtaaaaagttaagcgatataccaacatcaacgttgctttgccctgctaaatagccagacaataagccatgtgcttgctcaatcaatgggtctgcctcaagggcaagctctatggcaatttcagctcggtagttatcaccaacattttcactattaaagcttgcggtaagtggcattcctaaccagtttgcctgggcattgtttagcacaattttgtcgttattaaatttaactatgcctgtcatatgactcagcgttattcccggctgggctaggtaaacgggtaagttagctaattcaacctcgcctacagcatcaacatggcctgaacgtaagttaaccaataaatcgatagctgctgttgcttctccctgcgcttgtacaacatcaaatacatttgcaagcggctttgccagcggtgtagcagcaaagaaaggcttaagcttactaccgtgagcacgcttatttatagcaacttttaacatatcagcatgcatcagatcagcaatgctcacatgaacactatcatcaagcgctaagttaactaatttgccggatttactataaatatccatgcgttcgttttcaaagtgcaaaataacgttggcttcttcaacctcaggccagcttggtgaaaacttgtacttggcattctcgacatttgctaagacttcaaattgaccttgttgctctttaaatggaaaccctttaaatggcccagaaaacaatacctgcgctttatttacttcgccgcccttaattgccccattcaaataattaacgagcttttcactcattacaggtagcggaaagtagtgtcctgcaaccttagcatcggctgcataggcttcggcatataagtcaagacgcggttcgtcagtcaggcttagtttcatctctgcagcaagcgtgacttcatcgttatcaagccaaatattatcgctgctaatgcgccagccatcatcaaagtgatgtaaatcaagctctacatttaactggttatagggaatatcttggctgaaactgccattagtcaacagctgattgttttcaccgtacaattgaatgcgccctgctgattggttgagtaacccttcaacgcgaattgcttggccaccaggaatcccctgtaatgataaccaattgatctgctcaccttgaaaccacaattgccaatgatcttggttatcaaattcaacatatgcgtcgctgagttggcctttaggttggcgcgctaagaaaggtgccagcacttcaaagttactaagctgggctaatttagccaacagcccaaaatcaaactgcttaagccatatttgatttttatcacctaactgtgcttcaaactgaagtgttggccactgttttaagtctcgctcaaacgtgagacccgtgctttttaaacgccaattatcttgccaaggaaataaatgaaagcccccttcatttaaacttatttgatgtgcttcttggttttgttgccaattaataaagctcggtagccattgcacttttacatcgctgatcaagcctttttctaggctaaaccaagtttgtaaatttatatcggagctgagctgctgtttatcggtattgataaattgagcaagccatttagaaacatcgacattggcagcttgtacatatatatcaccggccatagtctcaagagttgagccattaagggccatgcgagcatcaaaactacccaccgagatccccggtaaggccaagctacctgatccctgatgttgttctggggtattttgccaaacaatgttttcaagtatgagtttacgttttttaccatcactcaaggtaaagtttaaactactgtcttgcaccgcaaagtggccagtttcaccaaggaacaagccttcgatcagctctttttgctcaaagctgcctgcttgttgagtgttccccaaatcaagcatggtaggtaaatcaacatcagcatgaaaaccattgatcacaaagtagctcgatttaagctgacgggtttttagtgattcccataagtttacttcaagactggctttatcaatggttagtgcgataggtgaagtttggttatcttcaaacgaaatgtcttcgataactaaagcaggccctttcccctgccaactggccgagatagacccaattgataaattgacatcaaagcgctcatacaagaacacttcaatgtcatctttataatcattagcatagggtaatgaatacttaacgactgagacaataacggccagcagtacgagagtgatagcaaatacttgccataacttacgtaaacaataaaagcagaccgtttttgccttcattacatcattaccacatcaaattgttcttgattatataaactctctgtttgaatactgacttgcttaccaataaatagttccagttcagctaaattatgatattcatcatttagcaacgcttcgctcactgatggtgaggcataaaccataaatttatcggcagcataagcgcgatttactctgacaatttctcgtaaaatctcatagcagacagtttcaaccgttttttgcgaccctcgtcccgaacaagcaggacacacatcacaaagaatatgctctaagctttcgcgggtacgtttgcgggtcatctctactaagcctagtgcagatagaccatttatgttggctttagcacgatcttttgccagcgctgattcaagcgaatgcaagacacgacgcttatgctcatcactgaccatatcaataaaatcgataataataataccgcctaggttacgtaaacgtagctgacgagcaatcgcagaggttgcttcgatattagtattaaaaatggtttcttctaaattacgatgccctacaaacgcaccggtatttacatcaaccgtggtcatcgcttcagtttgatcaataattaaataaccacctgactttagctcaaccttacggtgcaacgctttttgaatttctgtttcaacatcaaataaatcgaagatcgggcgttcaccgggataatactcaagtgcttcagacagaataggcacaaactcttcagtaaactctttaagctcttgataggtcagtttagagtcaacacgaatacgctccatgtcttcaccaacgtaatcacgcaaggtacgaaatgccagtgttaagtcttcgtgcaagatgctttctttactgattttttttcgtttgttgacgattttttgccacaatttttttaagaattcagcatcgtgacgcagttctgcttctgaggcaccttcagctgcagttcgcactataaagctgccgtcttcgtcgccgtattcagcgacaatttttttcagacgtaaacgctcatcttctgattcaatacgctgactcacaccaacatgcgtcgcatctggcataaaaactaaataacgagaaggaatagtgatgtcggtggttaaacgcgcgcctttagtgccaaggggatctttaacaacctgcaccatgatgtattggccttggcgcactagttcacgaatatcttgcacttttttaattggttgctcgtcaacaccttcaacaattgaggcactattaacgatgtctgatgcgtgtaaaaaagccgccttatctaagccgatatcgacaaatgcagcttgcatgcccggaagtacgcgactaattttacctaggtaaatattgccgacgatgccaaggttgccaatacgttctagctggatctcttgcagtacgccgttttcaattagcgcaacgcgactttcgctcggtgtaacgttgatcagtaattcagtgctcatgttaccctcttaaaaattcatttaataactgttcagtctcatataaaggtaagccgaccaccgcaaaatagctacccgaaatatggctaacaaaacgtccgcctaagccttgtatgccataaccgccagctttatcttggggctcacccgaatgccagtaagcatcaatttcttcatcacttaactttttaaatgtcacatcagtgacaacaacacaactttttacttgctcactatttgcaattgcaacggctgtcatcacttgatgggtgcgcccagataagcgctgcatagtggctgtaaagtctgcttggtcaacgggtttaactagggctgtatcatcaatgacgactacagtatcacttcctaacacagggcgatcagtgtagcccatagctacacctgattgtgctttgagtctagctaagcgttcaacataatcacgaggagattcgttcggaaattggctttcatctgcatcaacgctaaattgagaaaactcaacgccaagctggctgagcaactcttttcggcgcggtgatgcagacgccaaataaattgcggtctgcattatctaatcctgaaatgacggcgatatttacgcaaaattaagaaaatccaccaccagcaaagcatacctgttagcacaggccacaaataatgcggactaaaataaatacccattaaaaagtgatttagccaaaattgcataaggtggtaaagcgttaaaaacaaagcaactaaaatgctttgctgccataaagaaaagtttctaatcttttggaagttactagcagtgataaatatacacactgagtaagtcagtgagtttacacccagtggcgagcctgaagctaagtccattaataaaccgaccacccaagctgtaccaatgttcaaacggtgtggtaccgccaacgaccaatacattaataccattaacacccaatctgggcgataaggctcaaacgaaatcggtaacggcattaacgccataaccaatgcaaagaaaatactgatagcaatcagcaaagagtgacgactattcattgcttatgctctcctgctgattacgccacagcacaaccaacaagcgaatccggtcaagttgtgcaattggctcagcatatacttgcgcaaaaggacgcccttcgtcacggttaatttcagttactacagcaaccggataaccttcagggaaagtgccacctaggccagaggtaaccaaaatatcaccaatacgtacgtcaaggctgtgcggaacgtgcgaaagcttaactacattaattttacctatgccttcaaccacggtacgtacatcgttacgtaaaatacgcacaggtgtggcatgggtggtgtcggtcattaacaacacgcgcgaagtagtcgaaccaacttgggtgatttgccctaccacacccatttcgtcaataactgcttggccttcacttaggccatcggtagtaccgcggttaataaccacttgatgactatatgggtttgagtgaacagacaagacctgggcaataattttacgatttgattgtttagcagatgaacctaacaaagcacgtaacttatcgttttcacgagataaaaattgcagttgttggagttgctcgctttgcaataactgcttcttcttaagtgcttcgttttcagttaaaagctgttcgcgggtgtgcagattcttcgcgccaatactaaatagctcatacggcaaattggcgagataaataagtgggctaacgagggtatttaaactggtgcgaattgttgtaccaccttgtgtgtagcgatcgcccacgatcagcacgacactcaaaagcactgcgacaaaaagtcgcagttgcaaagagatggtacgaccaaaaagtaacttcattagtcgtagctaaatacgtcaccaccgtgcatatcaatcatttctagcgccttaccgccgccacgagcaacacaagttaatggatcgtcagcaaccacgaccggaatacctgtttcttccattaataaacggtctaggtcttttaataatgcaccaccaccggttaataccataccgtgtgcagaaatatccgaagcaagctctggtggagactgttcaagcgcaaccataaccgcgctcacaatacccattaatggctcttgcaacgcttcaagaatttcgtgtgagttcagtgtgaatgaacgcggaacaccttcagcaaggttacgaccacgtacttcaatttcaataggctcatctgttttaaacgccgaaccaatttgatgcttgatgttttcagccgttgcttcaccaattaagctaccaaagttacggcgtacatagttgatgatagcttcatcaaatttgtcaccaccgatgcgtacagatgaagagtaaaccacgccatttaacgaaataatagcaacttcagttgtaccaccgccgatatcaacaaccatagaacccgttgcttctgatacaggtaaacctgcaccgattgcagccgccattggctcttcgattaggtacacttcacgtgcaccagcacccatcgctgattcacgaatagcacgtttttctacttgtgtagcaccacaaggcacacaaataagaacacgcgggcttggacgcataaagttgttgttatgtacttgcttgataaagtgttgcagcattttttcagtcacgtagaaatcagcaataacgccgtctttcataggacgaatcgctttaatgttacccggtgtacggcctaacatttgctttgcttcagtacccactgatgccacacttttcgggccaccagctcgctcttggcgaatagcaactacagaaggttcatttaatacaataccttcttcttttacataaattagggtattggctgtacccaagtcgatcgatagatcgtttgaaaaaataccacggagttttttaaacatgaggctggatgacctttgaaaatacgttcttatactagctgctctcactctatcatgctaatcatgaaaaagcgcaactgccttaaattaattgctaaaaaaggaagcttatagcgcttcctttttaaatatttatcgctcgcgtactaaacgaaagccgatatagtttgcacgaaagtctggcgctaaaattaggcgtgttgatacgcgggctaagctaggcgcaaagttccaagcaccaccacgaaccgttacatcagactgtcctggctttttatatgtccattcccatacattacctactgtatcaaataggccaaatgcattaggagaaaacgaccctgttggtgcagcgcttttatttgaccattcgctcccacaccagccacagttcgctaagtttttaccgatttcgttaccccaagggtactcggtttcagtaccagctcgcgcagcatactcccactcaacctcgtttggtaagcgaaataactgacccgtttgccccgataaccaatctgcgtatgcttttgcatcgttataggttaaacataccgccggaaaatcactttcttgctcgaaacctgggttacgccaatttaacgtagcttcccatactggttcaccatttaagtaataagcacaaccacgatttttttcagcttctgttttgtaacctgtatttgcaacaaaacgctcatactctgcaacagtcacttccttgctttgcattgcaaacgaattagcaatggttttttctaccactggacgctcgttggctaaaccattgccgttaatatcgcccatcttaaatttgcctgcaggaataacaacgatacctgctgaattgtttttattgacgatacttgcaactggtgaagacgttgctggtttttcagctgctgtaaccgctgcaacaactggctctggttcttttaccaaatttgcatgaattgtttgcgctttgcgaagatcaatacgcgctttatagcttttataaccacgcttgcgaatttcaacttcatgaaaacctacaggcaacgaagtggttaattttgtcgcaccaaaactcacgccatcgataaacacttcatcatcatacacattagaacgaagtgttagctcaaccattttagattttttcaaatcaggtaacggttcaacctttactggcttttttgatgaataatcgctaacaggctcattagtcatacgtgataccgataccacctgactattatccaaagggtcactgaatgttaactgactatcagggtaagatgccgagtaattagactgatagttgcctgcaagtggcgagccataatcagcgcagaatcggttatctaaattaagtaaactacataagcggctgctatttacatcaccgcgcatggtcacgcttaagttgacgttatagttaccttgaccgctaaatgcactgttgacaacatggctacttaacaccttaacttgcgcacccgcaagattgcgttttggttcaaccaatcgctcttcagttaagttagcaaaaatttgatcaacaaaacgtttagttgctttttgcaagcccatttgctgaccgcgctgctcacaggcagcaagcgtttcggtacgtttacaattgatggtgtgattaacttctaatgtaccttcacgtgtaaactcattacgtaaacgctcaacacgcgctgttgcgagttgttcttttaaactttctaatgtattgagttgggtatgtttagctacgcgaatttgctcaatgtcttttctatgcgatgcaattgccgccaattgcatcgaaatatcatctttattctgtttgtggtcaacaactgctttttgatagcgtgcttgtgcattgctaatgtctattgttggatcatcaataagtcggcgatacatctcgttcattgcatctagcgcttggtttttttctttgtctaactctgtcgagcgtgcgcgcaataattcgagttgcttctgtaactgactttcttcttttaggtgtttttcaaggataacagtcgagttatcgtactcggcttgttttttactgatctctgactctataccagttaccgtagcagtatcttgtgcaaatgcactagttgctagcaaactaactgaaataaatagagataaaggagcgattcgcatatattccattcccaaaaagcggcaattatttggtcattattatttttttataattaaactcttatgctatgtacttggaaagcaaaacacaagctttgttcaattattatctgagtttacaactattaccttagttgatgccagtaaataacaaaatcattttagtttaatttcttagttgatgatcagtttgctacaatagagcgtgttttttattaaaattgctgctgtgtatagttcttttgagtcacctttacaaaccataaaccatcccttattggctgctcgtaaaattcagctcaccataaagcgagatgatcttattcacccgcaaattagtggcaataagtggcgtaaactaaagtttaatttagccgcaatgcaacaacttggaaaatctgaattactcacttttggtggtgctttttcaaatcatatccatgccagcgctgctgcggggaaactatttggttttactactcatggtataattcggggtcccgaacttgatagcgaaaatccaacactgcgctatgcaaagcaatgtggcatgaatttacatccagttgaccgtgttacttaccggttgaggcatgatcaaaattacttagctgaattacaacatcaatttcctaatgcttatattttacctgaaggcggcactaattcagcagcccttttaggctgcaaagagttggccgaaagccttcccccagcagactatattatatgtcctacgggaagtggtggaacactagcaggtttaattgagggtgcaccacaaattacaacagtattaggggtggctgtacttaagcaagctgagtatttaataactgacattaaacaattgagcaaccgtgccaaacaacaacaaaactggcagctgttatgtgactttcatgatggcggttatggcaagtttagtgctaatttgtggcagttttgtcaagcatttaaccaccagcacgacattcctcttgaacctatttacagtggcaaaatgatgtatgcactatggcaactcattgagcagggcttttttgctccacacacacacatcattgcgattcatacaggtgggctacaaggtttagatggcttgcgataccgcaatttaatcgactaattagctgtattagctatgcggtgttatatctgctaacttttgtaagggctcagcaaagtaaaagccttgagctgcaaccacccctaagtttttgagggtcgcaagttcattttgcgtctcgacccccaccgcataaacaggaaagcttaattcgctgcccttattgataatctgttttacgatcttctgctgttgagcatttgtatctatattatgtattagctcataggccagtttaatactgcgtatattattaagctgcgcataagtagctaggtgctctgcacttctcacgttatcaattaccacaccagccgacagtttctctaagcacttaaactgtgagattaattttttatgttggcgtagataatcatcttcactgagttcaaattgaagtttactaattccctcatagtcactcatatgttctttaaaccaaacccaaaacttgtcattgaaccagttcatagcatgtaagtttatactgactgtgattgcaccagcttcgttagagagtattctcttcacttgagtaataacgattttatctaaaaacaacacgtcatttttactgctcatgtggggaataaaatgccgagctgccaatagccccaaatttttatgacgaatgcgaattaacgcttcatgctgtaaaatttcacctgtttgtaaatcgaacaatggttgaaaaaacaacataaaatgtttgtttttaatgtactcaaacaagtgctctttactgtctgctaacatgcttgattgggtatgcccgaacggcaagcgatgaatatgttgccatgcactttgtttagccatagccaatgctgatttagttagctgatatacaacagcttggtctgctcctgttcggtaattacaaacaccgatcttgacatcagcacgtgataaatcactgcgatagtttaagcacgcttggtaaataacttgatgaagccgtttggtatatttatcaagctcagttgcagggatgttatttaaagtaaccgcgatgccacctgaaggaagcaacttaacggagcgattaaccaactcaccaaaacctttcgcaatcactaatttaaagtagttatcaacatccaggttcgatggaaaaggtgttttccaaaagaacaaagcaaataaatggttataacttgttggcaccccataaagaatattgaggtcttgtcgcggtaaaggccttggcgatgctagcttttgtgatttaaattggggttcaatttgtgcatctgctgatgcttgcggtttgataacaggttgctctttaatagccgtagacttagccatacttcgccaccaacgcccagcccaatagcctgttgctagtaaaataaggtttaatagtataaataagtggctttctagtaaccaagctggccaatgaaacaaacgtaaactgactgttttataactaaatacttcttgctctacatcaataaaatttgcaaagttttgcggcaaatcagctacatccaagacaaaaccctgactttttacaatagacgcgatgatgtcttgcgaggtgataggatctaagtttaattcatatacttctttagccagctcagtaccagtatgatgaaccttgtcatgaagtacatcattaagaaaaatgttaaaaacaaccacaagcaaaagcacaatcgtcacataaatgaccactggtcgcttgatctgtgaagcaaagtcttttttcatttcacaattttgttgcccaaagatatacaaagtgttgttcaagaaccccataaatacaaggctacaggctgattaaaagtaatttcagaagaatcctaataccaacgctgtcaaaaattccgtaaatttaacaacctagcatttattggtaatgagaattattttgtaatcaacaattcaaaaggtcacaactaaatctctgcaacagagttaaataaagatacgcaaacttttacagtaacctgtaatcaatcccaagataactgtttgtaatgatgaaaggcattattatttagccttcgtagatgcgcattacccgcaaaaataagcgccatcatgacagcgtagctgatgcacaccaggctcatgaagatgtatttactctaaatacatttatagcatttgatgtcttatattgagcttgttctaaatcttttatcaatttagataatagcgccaattcggcttgtacttcctgcatattttcagtgatattttggcttgccttactcgcttcttcagctaactgattttgtgattcaatcgctgatgacaccatgtttgtttggccgctcacctcagtgatattagttgtcaaaatatcgatattcttgagggcattttcactattttcactcaccttctgcgttgattcagaggtattttccatatacgcctgaagttgttgcacttgctgctttatgtcatcaagcactgaagatatttctgatgttgaatcttggctacgcgttgctaaaccccgcacttcgtctgcaacaacagcaaaaccacggccttgttcacccgctcgagcagcttcgatagcagcattaagggctagtaaattagtttgttcagcaatactcgaaattgtatcaagcactgattgaatactgttcgtttttgcacttaacgaatctgattgctgatgagcctgctgaatcagcgtagatagtgagttaatgctcactttgtttgtgccaattatttgctttgtattattcgataagtcatttgcctttgctgtatttttagagctttcatctgctgacagtgcaatttgctcgatctggttagatagcctcgcgaagctatcttgaagcaccgatgtggttgaattaacactctcaactaactctgaaagttctgttgcaaaggtgattaatgatttaacactggattcgctactgctgtttgcttgttgcacttgccgtatcaacttagtgagggtatctaccaactcatcaacacttctagaaattgcacctatttcatcactcgattggtcatcaatcctcactgttaaatcatggcttgaagcaatttttccaattaaatctcgtacttttctaacttttttagcaagtgccttgattacaaataaaccgaaggcgataaaaaaagtaataaaaaatatcgcaagacctaccgttaccacagcctccattttagcatcaacgtgcttttcctcgataagcgactctaacgcgctttgtttttcagtaatacgcttgtgaattttgccaattaagtccgttgacaaactaaaccagtccgaaggttctgggtaagacaaagccagcttgccactttcttgatttaggtttttgataattgccttaatatctttaaaggcttgtgaattagtcaattctgatagccatactttatcttcttttgcggtgagtgttaaagcgagcatagccaaactttcttcaatattattaaaatagccagcaacttgaacctgactatctttagatattgattgtaatgataaaataccattcacctttcctctaatctggcctaacctctcctttaacaaagacattctgataatagctaaacctgaagagattgcttcggattgtctaatgtgtgaaacccggctgttagcaacatccaacataaactggttggcattagaataaacggcaaacgctgattttccttgctgcctatcgatattttctcttaacgcttttatatttttgtgcttttctaacactgcagtaaatagggctattgagtgttttttcgtttgagtataattagaaaattcgttaaaaactttatcaacaatcaagcgttgcttagcaactttgtcaccgtttttgcgataccctgaaccaataaagccagcagttaatcccctttcgactgccgtttcatgcgctattttatctatcatcaatacttcgctgataaattcagcatcttgactcacaagctgctttttttgcagggacgcatcaataacaatataagatgttgtaagcatcacaaccaaagcaaatgcaattactgctgctagcgcttgttgaaagcttatcttactaagtattttcatgggtataggaataaagttttttattaaacttagaccatacgattgatatcgccagtatttgtaactctgctccaggcatacttgcagccataaaagagaacgtaagctctaatcctagcttcacagactcaattaaaagataaacgattcaatgcaaagtaaaggacataatgagtgggtaaatttgtgcggccagcatgcatcctaagttatttttcaacattatttttaattaaaaaaaaagagccgctatttagcggctctcttatacatttgcaattttgtcttgaattagaacgggatatcgtcatcaaaatcgattggtggttccattgggtttgatgcgccgccttgtggtgcattttgtggcttaggagcaaaaccgccttgttgtggtgcactgctttgctgtggagcaccataaccgccaccgtattggttattgttttgttgttgcggcgctgactgctgtggacgttgttgctgtggtgcttgtgcagactgttgctgtggtgcatagctattattgctttgtgcttgttgtgagccaccaccgtaaccgccgccttgctgttgaccaccttggtaaccgccttgtgattgaccaccttgatagccgccaccctgttgatcgccaccacggccacctaacatttgcatttgaccgcccatatctaccacgatttctgtggtgtatttttcttggcctgattgatcagtccatttacgcgtttgtaaacggccttcaatataaacttgtgagcccttgcgaagatactcaccagcaacttcagctagtttgccaaataacacaacacggtgccattcagtacgctcttgcatttgccctgtgtttttatctttccagctatcagtcgtagcaatgctgatattcgctacaccattgccattaggcatataacgtacttctggatcttggcctaaattaccaaccaagataactttgttcacaccgcgtgccatggaacttctcctataaaacgttagattaaaccagcaactttacgtgcttggtctaggtcaaattctttgtcattaatctttaaatagctgcgattttcatcacaaacaaccgttgcttcaatgacgcccggtaaagcaacaagacgagaagcaagtgcctgtgcttgctgctctgaacttaattcggtcattaagctaattattttacttcttggtgggacttgcatattccaagcaatgataagccatattaccccaacaagtgccgctgccgcaaacactgcttgcgcacttaatgcttgggcaacatagccacccaataaaccgcctaaaaaggcaccaaaaaactgcgttgatgagaacacccccattgcagaacctttctggtttgcaggggcaatgcgcgaaacaagagctggcatggtggcttctaaaaaattaaaagcaataaagtaaaccaacatacaaataccaatgccaatcaccgaatcaacccatagcgacatggctaacatgcttaacaccagcagtgcgattgagccaatgaatgcttgtttttctttttctttgcgaatcgccactatcatcataggtgccatcaagaaaaatgctaaaaataatacaggtatgtataaataccaatgatgatctgcaatcaatccatctttaataagctgacctggtaatgctacaaatacggtagttaatgtaagatgaagcagcatcaccccaaaatcaaggcgcgctaattgtgggtgtttaataagttgcttaatgtcatcaagtgttgcaagcgtgtcgccttttggggctttactaactgcattgggcactaagaacaacacgataaaaatacctaaaagcgccagccctgcggtaagccaaaatactcctgcaacaccccacgatgcggcaactattggcccaagtaacatagcaacggcaaagctcataccaatacacataccaatgacagccattacttttggacgctgttcgtcacgacttagatcagaagcaagtgctaacaatgcactggctattgcgcccatgccttgtaatgcacgccctaacgtcaccatttgtactgactcagctgttgccgctatcacagaaccaagcgcaaacacacaaagaccaccaataatgacttttttacgaccaattttgtccgataaccagcccataggtatctgtaatacagcttgcgttaaaccataagcaccgatagcaaagccaatccatagtggcgaaaacccttctagctgctgaccataaattgccaatactggcatcagcataaataggccaagcatgcgaaatgcaaatacgctcgccaacgaaacggcagcgcgtttttctcgagagttgagtgaagatgctgtcatgaattactgatcttgctgtctgttaaaatgtgagcgtggattctaccacaagcaaaaactaaataatcacctgtgagtgatgattttttctttgatcaaggattaatcttatcgcgtattgtgagatactgaaaaaataattaggtaacaaaacgagatagcatggaaaacattgaagtccgaggcgcccgtacgcacaatttaaaagacatcagcctaaccattccccgtgataagctgatagttatcactggcctatctggttcaggaaaatcgtctttagcgtttgatacgctttatgcggaagggcaacgtcgttatgttgaatcactctctgcatatgcaaggcagttcttatcgctgatggaaaaacccgatgtggatcacatcgaaggtttatcgcctgcaatctctattgagcaaaaatcaacctcgcataacccgcgctcaacagtcggaaccatcaccgaaatttacgattacctacgtttattatttgcccgtgtaggtgagcctcgctgtcctactcacgacttaccgcttgcagcacaaactatcagccaaatggtcgatacggttttagccctaccagaaggtagcaagctaatgctattagcaccagttgtgaaagaccgaaaaggtgaacatgttaagctgcttgagcaacttgcaagccaaggctttattcgtgcccgtattgatggcgaggtttgtgacttatcagatccaccaacccttgagcttcataaaaagcacactatcgaagttgtggttgatcgctttaaagtaaaagatggccaacaacagcgtttagctgaatcattcgaaacggcgcttgagctttcaagcggtatagctcatgtagcggcaatggatgactctcttagcgaagacatgctgttttcagctaactttgcttgtccaacctgtggctatgcaatgggcgagcttgaaccgcgtttattctcgtttaataacccagcaggtgcatgccaaagctgtgatggtttaggtgtacgtcagtattttgatccaaaccgtgtagtgcaaaacccagagctaagcttgtcgggcggcgcaattaaaggatgggacaaacgcagcttttattatttccaaatgctgcaagcagttgcggagcattacaagtttgatttagaagcgccgtttcaaaatctgagtaaagaagcacaaaaagttattcttgaaggttcaggcaagactaaaattgcttttaattatcgcaatgaccgtggcgatttaattacgcgcaaccatgagtttgaaggcgttttaaataatatgaaccgccgctaccgcgaaacagaatcaaactcggtgcgcgaagagctggctaaataccaaacgagccaagcgtgtccaagctgtcatggctctcgattacgcgaagaagctcgccatgtatttattggccaaaccaatctacctgccatcaccacaatgagtattggtgaaagcatggcattttttgatagcttaagcctaactggtcagcgtgcccaaattgccgataaaatcctcaaagaaattcgcgaccgtttatctttcttaattaatgtaggccttaattacttatcacttgagcgaagcgctgacaccctctcaggtggtgaagctcagcgtattcgtttagcaagccaaattggtgcaggccttgttggtgttatgtacgtactggatgaaccatcaattggtttgcaccaacgcgataacgaccgcctactaaaaacccttattcacttacgtgatttaggcaataccgtcattgtggttgagcatgacgaagatgccattcgcgctgccgatcatattatcgatatcggcccgggtgcaggtgttcatggcggccatgttattgcacaaggtacccatgacgatattctagccagtaaagattcaatcacaggtcagtacctctctggtgagaagaaaattgaagtacctgaggctcgccatcaaactaccgacaaatggcttgagttatttggtgccacaggtaacaacttaaagaacgttgatttacgtattccatttggcttaatgacctgtatcacaggtgtatcaggctcaggtaaatcgacgcttatcaacgacactttatttaagctggctcatactgagttaaatggcgcaacgaccgcagaagcggcaccttataagtcaatcaagggcctagatcattttgacaaagtgattgatattgaccaaagcccgattggccgtactccgcgctcaaaccctgcaacttacactggtatttttaccggtattcgtgagctttttgcaggcactcaagaagcccgttcgcgtggttataaagttggtcgctttagctttaacgttaaaggtggccgttgtgaagcttgccaaggcgatggcgtgatcaaggtagaaatgcactttttaccggatgtatatgtgccttgtgatgtatgtaaaggtcagcgctacaatcgtgaaaccctagaagtacagtacaaaggtaaaaacattcaccaagtactcgaaatgaccgttgaagatgcccgtgactactttgataaaatcccggccattgcacgtaaactgcaaacgttaatggatgttggcttgtcgtatattcgcttaggtcaagctgcaacaaccctctcgggtggtgaagcgcagcgtgtgaaactggctcgtgaactttcaaaacgcgataccggtaaaacgttgtatatccttgatgaaccaactacgggtttacactttgctgatattcagcaattattagtagtactgcaccgcttacgcgatcacggtaataccattgttgttattgagcataaccttgatgtgataaaaaccgcagactggattgtcgatttaggccctgaaggtggctctggcggtggtgaaattttaatttctggtacacctgaagacgtcgccgattgtgaacgttcacacacaggcaggtacttaaaaccactactataaaaaggatattgcgtgcgtaggtatttaaaaattgcaaaatggcgcgctaataaacagtttcaacaacagcaacgtagctggcaacctcataaaacaaggttggttgaacgtttacaagccatttggtttaacttaagtaccgcacaaaagctctatcttttggcattaagcagcctgattgttgtgccatcaggctggttaagtgccaccatcaccattattgcacttgttattgaattttggcctaagtttaatcaactttggcattcacttgccggcaaggcactgattttaatcttctatgctagtatcgctaactttgtgttggcaggtgcaagcggcatagtaaatgatgtaacccatgtttctgccaatcattttaactacacacataactttgccactctgttatatttaccgccttgggcgctgggaataacactaggtacattattgttatttcaactctttttgcctttttatatttttattctattgctgataaaaccatttggctctgagcgagttaaatttataagtcaaagctattcgccgctgttaaccgccatcgtgcgctttattttagcaaccgtagtatttattaacttaatttcgtttcttgatgacaagccacctgaagaagtgctccacaatatggttagcaccttcatagacagtaaagtcattgccaaagagtcaggtgaagagcagcaaaaagcggttgaagaactcagtgaaaaaattgagcaacaaattcctgacatcaacgaagaagctcaggtacctagccgtgatataaacatacaagctgataacgaaacggctgaaaatctacgtcagtttttagatagtaaaggttactttgagcgcagcaaacgcttaattgccatgtttgcttacagctttgaggccgatagttattcgcgctgtttaaaggctgaaaacagtaaagctgttgagctgaatgattacgaaatagtgcaagtaacccctgatcacaatgctgaatatggctatcgatttgaagtcattgcgtgtgactcgccaggcgttacccctgttgcaaagtaacgcagtaatcctcttttattaatgaggcttgctgcgcttctgccagccagtgaaagaataatagcctcgataaagcaaaccctcaaaaataatatgctttaaaaccttatttcggcccataaggattggacctaaaccattgaaattatttgaattaaattttcaaaaccttataaataaatcgcttagaactagataagcgactctatccgaattcctcgctattgtagtttccatcaacgggctatcaaccacttttgcctcgttgataaaaccaatcaaccaattaagggaattacattatgagcaattcaattttaaaaatgatgccactactagcagtcgctgcactcgttattacagcaccgaacactttactaaataatcaaggtgctcaaaaactagatcaacagttagagacatctatagccgcctctattgagcaaatgaacaataaaattgatcaccaaattgaacaacagctcaataactaacagctagtttgcccagcatgctgggcaagcctcatcaattaacaggctaaaataatgaaaacattaactcgatacttgctcatctcattcattgctacatcaggcttattagcaagtagttttagcatcgctaaaagtgccatttggcaggtaagtaaaggtgatgaatatatttatcttgctggttcaattcatattttaccttctaaagagctgccacttcccactgaatttaatcaggcttataaactgatagataccttagtgcttgaagccgatgtacctgcaccaagcaatagctcggcacaactaaccctgcttaaagctcttagctatcaagcaggtgaaaccttaagtagcaaactgacagaaaaagttaagcaacaattaaaattacagcttaatagctatggcatgcatctctatgaactggatagctttcgaccttttatggtgagcttgctaatcatgtcgttagagttacaaaaacagcagctcttaggtgaaggcgtcgatagctatcttgcgaaactggccaaacaagataataaaaaaatagcttaccttgaaaccttagctttccagttaaatttgtttaaacaattaggcaatgaagatgagaatgcctttatagaatcactattggcacaagtttctgacttccagcaactgtatgttgaaatgctcgatgcatggcgaaatggcgatatgcaagcaatggctcagcttactaccctaccactaaaacaacgtgatccccttacttatgaaatgttaattaagcaacgtaatttaacctggcttagtaagatagagcgctattttactaatcatcaaaaagagctggtgctcgttggtgcagcccacttggctggtgaagatagcttgttaggcctattaaaaaataaaggctatgcaattaaacagttgaacacagatgaggaataaaaaaatggaaaaaacagacaaaactgctgccgcgctgatgtgtttttttactgttttaattgtgctgagtttttaatgaataaaaaaataccgctgttaagcggtatttttatttcaattatttgttgcaagcttacgggcgaggaataaaacctaccgcatcgtacacagcttttaatgttttttcagcgcgaatactcgccttttcagcacctgatttcataatgctatcaagtagtgattgatcttcacggatctctttaaagcgcgcttgaattggctcaatcatattaacaaccgctgctgcagtgtcttttttcaggtgaccatacattttgtcttcgtattcaggaactaagtcttcgattgagcgcttagttgcaactgataataaagtaagtaggttagatacacctggtttttcgtcacgatcaaagtaaatacgtgcttgttcgtctgaatcggttactgcttttttcagtttcttttcaatcttcttcggctcatccaataacatgatgtaaccgtttggattttcatctgacttagacattttcttcagcggatcttgtaagctcattacacgtgcgccgaactcaggaatatacggctcaggtagtttgaacacgtcaccgtataggttgttaaaacgtgttgcgatatcacgtgttaattcaaggtgttgcttttgatcttcacccactggcacttgatccgcttggtataacaagatatctgccgcttgcagcactgggtaagagaataagcccacattcacgttattcgcatgtttagatgacttatctttaaactgcgtcatacgattaagctcacccatttgcgcgtaacagtttaatacccagctcagctgtgcatgttctggcacttgagattgcacgaataacgcagctttctctgggtcgataccgcatgcagcatatagcgcaataccgtccagcacgcgcgagcgtaattgctctggatcttggcgaactgtaatggcgtgtaaatctactaacataaagaaactttcgtggtcttcctgtagcttaagccactggttaatagcgccaacatagttgcctattgtcataccaccggttggctgaatgccacttaacactactggtttactcatgatgttcctttatattttttactaaactaaaaagacgaatttaaaatgcacttacctttgggtaagaacgggtattatatctaagaaattctcgcagaggtactctggattgaaatcagcgaggttttcaccttggttatagccataacccagtgcaacaacgtcaacatttgcagcttttgctgccaaaatatcactttttgaatcgccaatcataaccgctttttcagggctgacatcgagttgctgacaagcatattgcaatggctcaggtgatggtttttttgccatatcatcgccacagacaataaactgaaaatgactggtcaatgagagtttatcaagtagcttttcggtaaaacggcgtgccttattggtgatcaccaccttaggaacaccagcaagtgcagcaagccccgtttcaacatgttgataaagcgcgctgtagtcacccacaacgtggtcatagtgctgataaaacaagttaatagcacgctctgcaagggcttcatccaaatactcgcttacttgcatgtcaccgctcaaagcacgcttaactaaggtttcaataccattgccgacccagctttctactagcttttgtgtaacaaccggaaacgctaaatcggttaaagtcaggttcatcgcaatgtataaatcataaacgctatcgaccaaggtgccatctaaatcgaaaaatgccgcatcgtatttcattattcaaccttcgcaagttcgctgcgcatcgcatcgatgaccgctttgtaatctggttgattaaaaattgcagagcctgatacaaacatatcagcgcccgcttctgctatttcggcaatgttatcaacaccgacaccaccatcaacttctaaacgaatattgcgacctgaatcatcaataattttacgtgcttggcggagcttttcgagagtatgtggaataaaactttggccaccaaagccagggttaaccgacattaatagcactacatcaactttatcaagcacatgctcaaggtaacttaaacttgttgcagggttaaatacgagtcctgcttggcagcccttatctttaattaattgcaaagtgcggtctatatgctcactggcttcagggtgaaaactgataatcgacgcccctgcttcagcaaaatcaggaataatgcggtcaactggctttaccataagatgtacatcaataggtgctgtgatgccgtaatctcgcagcgctttacaaatcattggtccaaatgtgaggttaggcacgtaatggttatccattacatcaaaatgtataacgtcagcaccacttgcaagaacacgatcgacatcgtcacctaagcgagcaaagtcagccgataaaattgaaggggctattaaatacttttgtaaggtttctaacatgagtgatccaataataatttgctacgctaaaggagcgcttaatgtaacctaatcgcttactgattaaaacagtacgacacagggtaaatacttagctaaatagtagaaagcctttaagatcattcgaatataagaactattaattagctgacctgctacctaaaccgattaaacgtgtcaaaagcaccaaaaaacaaaacaaaaattaaacataaaattaactttaacgcgctaattttattaattttttaatcaattcagcatgaattaagtttgttatttgagcaattattaggtatgcttgtttaaataacacaaacaagggttattctcatgcgtgcttttaaaatagggatcttaatcgcgtccgcacttactgttgctacgtttgtatctttttcatctgccgatgaagacgagtttttagcaacggcgtctggttgctcatgcaatacgctaaacgcatcatcatcttctgctcaatgtatgaaagcagaacaagaaactggatggttttcttggttgactggtgacagccgtagcgcacaattccattacctcgatttacttgagcttttaacaagtagcgaagagtcaaagaacgttagtagcttaagttcaaaattctaattacatgagcagctttattagtgcattacaaagtgtctttgcggcattttttggtgtgcagtcagagcaaaaacgtcaagctgacttcaaagagcattcaccactggctatcattgtgattgcagtcattttgtttattatttttattgctgctatttatttcgcggtttctttggtgctaaatacatagccatcaattcattcactttatttcgtgaaccacccttagggcttattgtccgcttcaccttaatctcatcaagtgatgcttggctgtagattttgcgagtccacactgtatcgtgattagaaataagtacgggcgtattattttcgaatgcagcctgctcagctaaattagccaagttagcttggtcatctaaattaaagccgcctttagcgtaagaagtaaacgacgccgttttactgagtggtacatagggtggatcacaatacactactgcgttttcaggaataagcttaaacacttcgtcataacctaagcaggtaaaagttgcttgttgcgctttttcagcaaagaaattcatttctttctctggaaagtatgggcgcttatattttccaaaaggaacattaaaaatcccttttaggttataacgacataggccgttgtacccgtgacggttcatgtataagaacaaaattgcacgttcatatacatcactgctttgattaaattgaacacggtattcgtagtaagcttctgggtgattatttagctcaacaaataacttttttgcatcgctaataaattcatccggcgtgcgtttaagctctgtgtacaggttgatcaaatcagcattgatatcatttaaaatataatgcttaaagtcagtattgaggaatacagagccagcgccaacaaaaggttcaactaaagtatcagcatccaaactcgcttgttttaagcgggcatgaatatcttcaactaggctgtattttccacctgcccatttaaggaaggctctggtcttttgctgcatctgctcttaacttcaattcgatattgcgcgattctacactaatcagttttaattttctgatcctgtgaagcaatttcttgcttaattttacttatttttttataaaaaggctgatttttacgcactttattcggtagtgtcgataacgcatttttcgcgtcgtttaaggtggcatagctaccataagttacaatccaccacactttgccacctcgcaaagtttgatacgtattaacttgcccttctaatgagttctctgtaataaacttatcaatgatttcttttttagtaacagctaacagctgtattacaaaatgctcgtctggctctgctaagtaccatgcatttgcactcactgtcggcgctttttcaactgtttctgtattaacggcctcaatatcagctggaggaggatttaaagcgtcgtcagtcaatactgcagcaatttcttcgctacttggtttggcctgttgctcttcaggttgtgcactagcaagactatcaacaattgcagcaatattattttcatggcttactgctggagcttctgactgttgaactgtcacagtattattatcaagctctactgacgcactgctcggctctgatagcgtttcatcgctgttctgttgagccgcagtcaccttttctgctgggagagccgtagcaatagtggcactctcctcttgttgataatgtgctttccaccattgggtcatatctgctttgtacaaaaagccaataattaataacatagttgttattaacaacagggttaaatacaacggtttgtagctcttttctggagggcgaatatctgcagtttgttgatctggttgccatgcaagtaataatgcaggattaccatgagcttcttgcaaaaaggttcgaaaaacaggatcttcttctaccggaaggctatcgaaaaaccaacgcatcaactgcttactttcactaagattaagtgcctctaggtgaatttcaacagcttgtgtgaattgcccaacagactgagatgctatcaaaatatataaggtacttgggcttttctttgccagtatctcgagttgatgaaccatctcctcagataaatgacgcccgccatcaatcacccacaagcaatcaccacaaggttgctgcctatacaggttataaaagttttctgataacgtttgggtatgatcgataagtgggttactaaagctttgttcgagtagctctgtaagcagctgttgatctgtcattttgccagacaattgtacaaatgctttgttaaactcagcgtacttatcagtgatgaatgtttctagtaagtaacttttacctagccctgaagggccaagtaagcaaattaaattctgcccatattcaaactgcagagcgattcgatcaactagcgcagcacggctaggcaatatttgcgattgcattagcgcgctattaaatcacaaacctgctgatcggtaacatcgcttaccagcgcgcactgaccaaattgggtaggaagaataaaccggatcgtgcctttcttgtttttcttatctttacgcatatgcgttaaaaactgctcgctagtcatttcagctggaatatcaacaggtaaatcgtaatgagcaatcaattgcactatgcgctcaacttcagctgcagttaaatcaccgcgagtttgcgctaaacgtgctgctaacaccataccagcagcaacagcttcgccgtgtaaccaattaccatagcccatttgcgcttcaatagcgtgaccaaaagtatgacccaggtttagtagcgcacgcaaacctgcttctttttcatcttgcgcaacaatcaaggctttgatttcacagcaacgataaataacatgctgtaatgtttgctcatcgagtgattttagattagcgatattttgctctaaataagcaaatagttctgtgtcatagattaaaccgtacttgatcacttcagccatgcctgctgcgaactctcgctcaggtaaagtatgtagtgattgggtatcgataaaaacggcttgcggttggtaaaacgcaccaatcatgtttttgccaagcggatgattaacagcggttttaccaccaactgatgaatcaacttgtgatagcaaggtagtaggcacttgaataaaaggcacaccgcgttgataacaagcagcaacaaaaccggttaagtcgcccacaacaccaccacctaatgcaataaggcaggtgtcacgaccacagttatgttcgagtaagaatgccgaaattttctcaaaccactctagtgacttatattgttcaccatcaggtatagaaaaagataacgggttaagatcagccaatgacgccattacatcatcaaggtatagaggtgcaatggtgtcgttggtgataatgataggtcgacaatcgccaatgtgttcgcgtaatcgacctgtgtctttaagagcagattgaccaatataaataggataacttcgctcgtccaaattaacagttaattcaagcatcgctagtttccttttttaattattggttttaaaaatctaatttctcaatgatttgattagcaacaactttagcgctttgctcatcagtgcggacaacaaaatcagccacttctttgtataacggttcgcgttcttcagctaagcgctctaatacatcacgcggtgcttcttctgtttgcaataatgggcgacgcttgtcgcgctgcgtgcgtgcaacttgcttttcgataggtgtctctaggtatacaacaataccacgagcagaaagcttattacgtacttctttactgatcacagaaccaccacctgttgcaagtacaataccttgcatctcagttaggtctgaaataacagtttcttcacgaagtcggaagccctcttcaccctcaaggtcgaacacccaagcaatatctgctcctgtgcgtcgctcgatctcttgatctgaatcgaaaaattcaaggtgtaattggtcagcaatgtgacgaccaattgtgcttttgccagcccccatagggcccactagaaatatattacgtttctcagccatatctttttagtacaaacgaactctaaaatttgaaataaaaccccgcctaacgacctggccccaaaattaaggaggggattatctcagtaattgcttgggtatttcaagtcaattagcataaaaagccatataacgagcaattaaacatgctaattgctcgttgcttaagaaaaaatcacttaatccaattgaatttttggtgttacaaagattaacagctctttcttttcattaaactcactggtgcttttgaataaggttcctaaatatggaatgtctccaagtacaggaactttcttcgttgagttaacaatttgctgttggaagataccaccaagaacaactgtttggccattctctactaacacttgtgtttggatttcttgagtattaatcgccaccgctgaacccgttggtgtttgcaccgtatcaccgcgtgtatcttgtgtgataactaggtctaaaatcaccttattgtcaggcgtaatgtgtggcgttacttctaagcttaataccgcttttttaaaggtaaccgttgttgcaccacttgatgcagcttcaacataaggaatttcggtaccttgctcaatacgtgctttttgttggttagccgtagtgatgcgcggactcgcgatgatctcacctcggttttcctcttctaaagcactgagctctaaatctaaaatggtgccgttagctaatttggcaacttgtacaccaatacttcccgcagggcttgaaattggtaagtttacatttaatcggtcagctaaacttggaatgttattgtaagagccagcaccaaacatgcctccagcgccttcaagagtcccagaaatagcaccgtcactgccgacatcgcttatgccccaacgtacgcctaagtcttcttgcacgttatcattcacagtaaccatacgtgattcaatcaccacttgctttactggaatatcaagggtttcaaccatacggcgaacactatcaatacttttagaagtatctttaattaataatgtgttagtacgtttatcaaccgaaacactgcctcgtgaagaaataatgctgttggtatcggtttttaataaatcagcaaactcttcagctttggcataattaaggcgaatatattcactgtataaaggctctaaatcttcgacttgctgtttagctttgagctctttggcttcacgcgctgccagttcttcagatggtgcaaccatcaaaatagaaccatccatgcgtttatccaaacctttaattttaagcacaacatccaaagcctgatcccaaggaacaccttctagacgaagcgtaatattgcctgttacagagtcgcttgttactaagttaaactcgttatagcccgcaataatctgtagcacagagcgaattggaatatcttggaagttaaggctcataggacgaccttgatattcaataccgccgtctaggtatgcacgttgagtatcatctttttcaactgttaaggtaaagatgttctctatttgttggtgagtaaatttaaacgcagcatttggctctaccactatacgagtcattgttccttctttgaaggtctcgattttgcttacaacggtaccaaagtcaataacgtcaagttcatacagaagctcgtctaaaatatccgtatgatggaattctgcaataattttaccaccgctttcatgtacatcaatcgcagcttgagtaccttgcaaaaacaccaataagcgagcttcatctttttcagtacgacgaaaatcaatggattgtacagtatttataaagttacttgaggctgataatggatcagtcgattcatcactggcaattgggttatctgaaacatgcagcgtgtaaacattgtctttagctgttgttttataaattttcaatttatccaacataacaacaacttttaaaccgtccgttgtcattgtgctagtgacttgctgaatacctgcttggtttatatttacagtctgaacttctttatcaacaccaacatcgtcaaataacatttctatccgagctggtgcgttataaacctgaactttaggctcaaatgtaagggcttcatcaaagactagctgcagctgcgtttcatccttcatgattggattgtaacgcacatcataaagtacaggtgcagcgactaccgactgcgctaccagtaaggttaatgcagcgaacatgtattttcgcatgtgctttaaccaagccattcctttatgcattttatttttaccttttatatgattaatctgcaccatttgtacctgcctctaacatttctagcttggtcaggcgctctttccagcaaccagccccatcagggattaattctaataattcaatgtagttgtcatgcacttctttaatctcaccatgatacaaaccaagataattacctactgtgacacgataaagtgtatcgtctgccgctttaatcaatgcccagctattatcagcttgaccgatagtccctttcattaataaattttcaagcgggtacttctctagaggctggcgaactcggctaggatctggatgtaagcagtttttaacttgtactaagttgttttgaataatttcaggtcttggtgcaacaaatgggctacgcaacttactggcactgtattcaaaatattcaaactttgcgatctgaggaataggctctactttgggtgtagtacttgcctttacctgatcgataaattctttttgctctgatgtatcatcgttacatgcactcagtgcaaaagtcataataataactaacggaagctttctcatcatttctgagtgcctccctcataacgataggttttagcaacaacgctaaaagtaagttcaccatcatcaagggtttgaatagtaaagtcatgcaaacttacgatacgcggtaattgtgcaactttaccaacaaactcaccaaactcatgatatgagcccacaacttctatcttaattggcagctcagtgtaaaactctttttctatctctggtaaccagccaatttttaaaaacgttaaaccacttgtcgtgccaacataagacaaatcgtcaagtaaacctggtgtttcattagaggtgggtaagcgctttaatagttgcgaaaacttatcttccatctcaatcatttgctggcgatataaatctaggttactcgcaacagcatatttagctttgtaagtatttctcagctcagtctctttggctactgaactgtgataattagctatttcatcagacactagcaagctataactaaaataaagcacgattgcagcaacaaaagtacaacacattacttttacagcaatgggccaatcgcccatattttcgagctctatttcgttccaatctatttcagttaacgatttgatatcaaggttcattgcgtacctcacctattttatcaaatggtttaacataaaaatccatattaaagtcacttagtaacctcgacgtttgctcaccagccacgataccttgcataacaggtcgctctagaagataagagccctgaacttggcgcaacatagtcgatagtcgattattagattcactacgtcccgatacatgtatgcggtcatcacgacgttctagcttagttaaataaacacctgaaggcacaatcttcgcaacctcatccataatttgtgtaccaagatttcgattgctttgtagctcctcaattaagcgcattcgctgttgcaggttttctttctttttatccaattcgttgatttcacgtatgcgttgatcaagtagtgcaatttcgttgcttaaaaagttattttttacattttgtccttcacgcaatcccgaatagaaagaactcaacatatacatacttaaaaaactcactacaacaacagcgaacagcaaagtaacaaatttattttgcgattcttttcgtttttgttcgcgccaaggcagtagatttatatgtggcatgatgaaaagctcctcaacgccaatcctgtggctatcgcgaactgtgttctatgacgctgtaaaatattacggtctacctttggagcaatttctatatttgcaaagggttcagcaaccactgtatgtatccctaactcttcaattaacaatcggtctaagccttcaatcatggctgtgccaccggttaaaacaatataatcgacttggtctttaccgctcgtcgttaagaacatttgtacggcacgtcttacttgttgtagcagcgaagtctgaaaaggtgcaagtacttcaaacgtataattaggaggtaagtcgcctgtggttttacctatttctgcttcatcgaagcttttgttgtaataagcgacaatactgtttgtgtattggtcgccaccaaaaacctgatcccgagtgtaaatagtctcaccggcttgaaccacactcacaagcattagcacagcaccaatatctacaattgccacacacttatcataggcatcgctaggcaattgttggtagtacacatctaacgagcggctcaacgcgtagctttcaacatcaactactttagcagttagatttgcagcttctaatacaccaatgcgagcctcaacactttctgtgcgtgctgcagataaaagtacattaactttactcggatcggcttcattaatggcgagcttttcaaagtctatgttcacttcgtcgagtgggtatggaattaagctgtctgcttcaatggctatttgcgattctaattcagcatcagttaatgatacatccataaaaataacctttgtgatcacagtttgcccagacactgcaacggcggcactttggactgttttaggcaattttcgttttaatttagcaacaacgttgccgatagcttcaatgtcttgaattgagcgttcagacatagccccttttggcataggttcaatagctaatgcctcaagccgcaaacctgcgtctgtctcttgcaacaacactgctttaatgcagtgagatccgatgtcgatccctaccatcatagatgaaggcttttttaatagctgacttagcatgattgcaactttgcctttgttttaataataaacaagttataatttttatctgaaaaaatattattcattttttaatcaatatatactagcagtctccgattctaattgggagtccatttagggaaaatataagtgattttattaaaacgaactttacaattttttatcatttgctcattcttagggctaatcactttagttggtctatactattacgttaaacctgacattcctagcgtacaggttttaaaagacgttcaattacagacacctatgcaagttttttcacgcgatggtttattgattaatcaatttggtgaaaaacgccgcattcccgtcacaatagatcaaatcccccaaccgttaatcgatgcgattttagcgaccgaagacaatcgtttttacgaacacattggtatagacccaattggtatcgttcggtcagccattgtactcatatctacaggtgaaaagaaacaaggcgcaagtaccataactatgcagcttgcccgtaactttttcttaacccgagaaaaggcttatatccgtaaagtcaaagagatattcatcgcattgcatattgaaagtatattaactaaagatgaaatactcgaattatatttaaataaaattgaattggggaatcgtgcttttggtattggtgcagcagcccaagtttattatggcaaagaattaaatgaacttacgttagcccaaatggcaatgattgctggtttacctaaagcaccttctgcactaaacccaattcgtaaccctgtgagagccaaggcacgtcgtaatgtggtacttggtcgtatgctaactgaaaaatatattagtcagtcagagtatcaagacgccgttaacgcgcctattacggcaaaatttcacggtgctgaaattgaagtatatgcgccttatatttctgagatggttcgcgccgaaatggttgagcgttatggccatgaacgagcttataatacaggcttcaaggtttacaccagtgtagattcaaatatccaacaggcggcacaagatgcgcttgtaaacaacttacatgcctacgatatgcgccatggctatagaggagcaaccgctcatttatgggatagtgaaaccgacacgccattaactcgagacgcgattttaaacaaacttaaagatgtaaaagagtttggccctttattagctggtgttgtcactcaagtagctgagcaatcaatctctgttttattaaaaagtggcgaacaagttaatgttgaatgggatggtttaaagtgggctcgtaaatatattacgcgctaccgccaaagttttgcaccagaaacagctggcgacattctcacagcaggcgctcaaatttggttacgtaaaaatccagacaatagctatatattaagccaaatacctgaagcatcgagtgcattagtttcgcttgatccgcaagatggtcgaattaaagctattgtaggtggttacagctttgaacaaagccaatacaaccgtgcagtgcaagcaaaacgccaagtgggttcaaacattaaaccattcatttattcagcagctcttgagaatggttatacactcgcttctattttgaatgatgcacctattaatcagtgggataaaagccaaggcgttgcatggcgacctaaaaacagcccagctgtttataatggccctattcgtattcgcagagcactggcacaatcaaaaaacgtaatttctgttcgtttactgcgtggtgttggcctagagcgcactgcagatcacttgcttaagtttgggtttttaaatagtgatattaatcgcagtgagtcgttagcccttggtagtgcctcgattaccccgcttgaacttgcacgcggtatgagcgcttttgcaaacggtggccacctaattaagccttattttattactgaaatccaagattcagcaggcaatacattatttaaggcaaatcctcaattggcttgtgatagcccaaaaccggctgccactgttgagcttgcagcgcgcgattcgagccaacttagcatcactgaaacagagcaaacaccagtccagcgttgtgccccgcgtattatttcaaagcaaaatgcattcttaatctcgcaagctatgcacagcgccatttggggcggcggtagttggagtcataaaacaggctggagtggtaccggttggcgtgctcaagctttagaccgacgcgacctagctggtaaaacaggtaccactaatgattctgttgatacttggttcagtggttttaatcgcaatgtactaacctccgtatgggtaggttttgacaatcctggcattacacttggccgtagtgctagaaataaaaacttagataattcacaaatttctggggctgagtcaggtgcaaaaaccgcacaaccagcgtgggtcgactttatgcgcgcagcgcttgacggtatgccagaagctcctattgaacttcctgaaggcttagtctcggttcgtattgatttagcaacgggcttattaagccacaagaatgactataccagccgcttcgaatactttattaaaggcactgcacctacaaagtatgttacagaagagccagcagatgtatttgaagaaaaactgagtacagaagaagaactgttctaattactatattagttttagacaataaaaaagcgcccatggggcgctttttgcttagccattaaaactaagatcagcaaaattattttaagttattcaccagccaatacagatctgaatgaacccctgccgcggtaacttctttacccgctccaggcccttggatcactaatgcattgtctgtataccactgtgaattaatcacaaagatgttatcgcccggtttaagacttgctagcacatcatctttgctaacatagactaaacctacctgtgcctgaaccttgccatcaacaagtgtgatagcacctgtgtagcgcactactttatcttctgccgcagcttgagctgctttttctgtcatgaattcatcgagcagctgtttgtttgcaagaaaatcttgccagctacctgctgccagtgctgctggcataagtggtgttagagcaatgtcatcaagctctaaatctagccctaaatctcgcgctaaaataagcagtttacgctgcatatcgcggccagataaatcttctcgaggatcaggctctgtgtaacccatttgctgtgcttgtagcactaaatcagaaaacggcaccttgccatcataactgctacataaccacgataaagtacccgagaataccccttcaatacggttaatgctgtcaccactattttgtaaatcagccaaagcaaagttaatcggtaaacctgcgccaacactggtgttataacgccataacagatttcgctcagctaattgactacgcagtgcttgataccaatcgtttgcagcggtacccgcatatttatttgcactgatcagatgacagttaagctctacaaaatcaggatacaactgactaaaagcctcactcgctgtgatatcaattatcactttatgctcataatcaagctcattgatacgcgctaataattcagctttgtcgtagctttgcgcttcattgtgccactgctcttgccatgtttcagtatttaaaccactggcactaaatagcatttgcttagagcgaagaagagcaaccacctttactttataatgggcagataaacgagcaaactgagcttgaagttgcgataagaacacttcacccacattaccaaggccagcaactataatggccagctcttggcctttgtttaccaacttgtcatgtagaagagttaaaacatcactatcaattgcttgatcatttaagatcaacacatagttatcgtcttgctgtacaaaacgaggatgaatgctctgctcttttaaaagcgctgttgcttgctctgcaagagcaccgatatcagcagtcggtgcaactaccgcacaaccgcttaaattagactctacaatattggcgcgacccgctaaatggctgacaatctgatgagtactttgaccaggcactaacaagtaggtatcaccttctttaacaaagtgatgcaagctgtgttgaattaattggcttagctcacctacttcaccactacttagtttatcaacgcgtaataaatcgatgttatctaaggtagtaataaaacgttttgctttgctatagccttcttttaccacttcggttggcgtggcatcgcaatcaaaactacttctaactacgagtttgatttctgagtcttttaacggcgataacgtctttgcatgcagtactgggttgcctaagcgcgctaataagtttgcttgctcacgacataccttggcgtatttaaccgcatttttaaccttacgagggtcagtgctaaataccccttgtgtgtctgtccaaatagacacttgtttagcaaaagtataactggccagtaatgtggcgctgtaatcactgccattacggcctaaagtaaccgtattaccttggcaatctgcggcaataaagcccgttactacgttgatatgtgatttgctaatagtatcgctgcattgctgctggtttttttgatgtaaaagctgaccatcatttaaagtaaatagctgccttgcatcaacatcttgtgcagcaatacccaactgatttaagtaagccgccaataagcgcgccgaccacacttcaccatgtgcaagtaaaggtgcttcaagtaactgttgctgactaattaattcgtttaatacagcaagttcatcttttaactgtgccaacgcctgttgtttattttggcctgtaagtaactgctcaataagcgcacgttgattattatcaataagcagtagaatatcgctaacagcttggctatcttgctgctggtaactttgccaaagctttactaaagtatcggttgttttacccgatgccgatacaactacgcaatcgccctgctccgtattcgctaaaacaatgttagccaccgcatgatagcgttctgccgagcttaagcttgagccaccaaatttatgaacaatatttaccatttttctaccacaatgccgtatgtgctggcgttaacttaaatgacgcgttttgttgtgtatcttgctgtgtttgcttaacttcagcttttgtaacttgctggccttgacctggttttactaaattaaaaacacggtctaaatcggcaataaggtcttttacgtcttcaatgcctacagaaatacgaataagggtatcaccgacaccagcttcaagacgggctttaggctccatacctgcgtgtgtcatcgttgcagggtgacaaatcaagctctctaccccaccaagcgactcagcaaggctaaagtctttaaggcttgttaaaaacgctgcggcatcgttaatgtcgcctttaatatcaaagctcaccatgccaccaaaaccgcgttgctgtgctttagcaagctcatgctgtgggtgtgaagaaaggcctggataataaacttggcttacataaggtgagttttctaaatactcagcaattgcaaaggcattttcttggtgctgcttcaaacgtacatttaaagtacgtaaaccacgaagggttaagtagctatcaaatggtgcaccagtaataccaatgttattcgcccaccaagcaagctcatcgcctagctcttgcgttgcagcaatcactgcaccgcccactacatcagagtgaccattaatatatttagtggttgagtgcacaacaatatcaacaccaaactcaatggggttttgtaatgcaggtgataagaaggtgttgtcagccgcaaccaaagcaccacactgcttagcaatactagtaattactttaatatctgttaaacgcaagattgggttacttggcgtttcaatccaaatcaacttaggtttaatcgctaaaatttcttggagattttcagttttagttaaatccaaaacttttagttttaacaggccacgtttttcaagcgaggtgaataaacggtaactaccgccataacagtcatgtggaataaccagtgtgtcatcactgtttaacagctgagttgctaaatgcactgcagacatacctgttgcagtaataatgcctcttgcacccccttcaagctcagctaaagtttcagctaagatatcgcgattcggattaccactgcggccatagtcatactggcgtttagtatcaaagtcagcaaatgaataggtggttgataagtatagaggtggcacaaccgcaccatgatgcttatcggcttcgatgccgtgacgaaccgctatcgtcgctttatttttttcactcatttcatcacctattcataaattggatgtttagacgtctaaaaggttagatgatcgactatgagaagtcaaagtatttatagctcacaatagaagtttatacatttacactactagatggctaaataactagtatttgactatcttttttaaagagatagaatttccgcatcttgcgcgatgagaaatactaattacctttacgaagtgttctattttgaattggtatctcgcgtaaataactgacaaccgaggcaacgaaataacttatggctaaatggaacggtgaatacattcacccatatgcagaacacggtaaaaaatcagaacaagtaaaaaagattaccgtatcgatcccacttaatgtattaaaagtattaactgatgaacgtacacgtcgtcagatcaataacttacgtcatgcgacgaatagtgagttattgtgtgaagctttcctacatgcttttacaggtcaaccattaccaaatgacgatgaccttcgtaaagacaaccctgaaaaggtgccagaagaagttaaaaagattatgcaagaaatggggttagatatccctgttcttgattcagagtaagtatttcggccatcggatcaccgccgatagccacaggcataaaaaaactcagcttaggctgagtttttttattagcgttaattaagtttaacgcatgtaatcttctggcatctcaatttgcgcaacccctgactctactgccgcctcagcaacagcacgagcaatacgaggtaataaacgcgggtccattggcttaggaatgatgtactcggcaccaaactctagtgactcaacgccagccgcttttaatacttcgcttggtacaggctcttttgcaatgcttcgaatagcatgcacagctgcaattttcatttcatcattaattgccgttgctcgcacatctagcgcaccacggaaaataaacgggaaacaaagcacgttattcacttggttagggaagtctgaacgccccgttgccataattaaatcgttacgtgcactgtgtgcaacttctggggcaatctcaggatctgggtttgaacacgcaaacaccacaggcttatctgccatcagtttaagatcatcggcagttaatagattaggaccagatacacctacaaacacatcagcatcagcaataacgtcttgtaatgtacgcttatcagtattgttagcaaataattgcttatactcatttaagtcatcacgacgagtgtggatcacacctttacggtcaagcatatagatgtgctcacgcagtgcgccacattttattaatagctccatacaagcaactgcagctgcaccggcacctaaacatacgataattgcatcttcgatgtctttaccttgtacttcaagggcattaagcataccagcagcggtaacaatagcagtgccatgttggtcatcgtggaaaactggaatatcgcaacgctcgataagcgctttttcgatttcaaaacactctggcgctttaatatcttctagattgataccaccaaacgtatcagcgatgttagcaaccgtattaatgaagtcttctgttgtgcggtgttttacttcaatatcaattgaatcaaggccagcaaaacgtttgaatagtaacgctttaccttccattacaggttttgatgcaagcgggcctaagttacctaatcctagaattgcggtaccgtttgaaataaccgcaaccatgttacctttacctgtgtacttataggcatttgctggatcagcagcaatttcgcggactggttcagccacacctgggctataagctaaagcgagatcgttaaccgtttcggctggcttagttagttcaacactaattttacctggaacggggtgagcgtggtaatgtaatgctttttcacgaaaatctgacataacgcgatagtatcctgcaaaaagttaaaaagtgagagagcttgcatcagtacgatacctgtaatgtataaaaattccaagtattatcaggtctatcctgttataagctatatcgcttaattttaaaggatttcccaacaatttctgtgcatagttgcgattaatcaaacataaaaattaacctatttatggccttttaagcgcgtgtttttgtattttatatgcacgaacactgcaaatagccgaaattagcccaaaacagccatttcaacgaagttcacagcatttactcacgaaattatttaaatttattatttttaatagcttttagataccaatacgcttaattaagtagtctattttgaggcaatgaaaccttgttgatagcaaggcaaaaatttcgttatttagttgtgttctaaatcagaaatttttaacgcaggtagcgacaggtttaatccctcaaaatgattaagtattattgcggattggtatactcatttatacaaaaaagaatatagccaaggggtggcactttgtctctacaattaacgacataatgggcataacagccagaaatagttatgcaaaggaaatgagtgaagatgataagtaagtgtcagcgttaataacgaattttgtgaattttagccataaaaaaagcaccctaaggtgcttcttttaactaaacagcagaaattacttcttgctgctaagtgcaccgaagcgcttgttgaaacgatcaacacggccgccagtgtctaaaatcttttgcttaccagtgtaaaacgggtgacactcagaacatacgtctaagtggatgtctttacaaagagttgagctagtttcgaatttgttaccacatgaacaagttgcagtgatagcttcgtacttagggtgaataccttctttcatagggaacctctagttaaggccgtatcgctctccaaacccgaagtctggcaccatacgcagttaatacaattaataggccgcgtattttatagctcaagtgaccttgcgacaagctttaaatacatatttcgctaaaaaaataatcaagtggcttgttgttcagtatttgttggtaggtttttaaccgtaattttagtacattatctttccgtctttgtttcagtagagttgttatgcactttgtagaagttgccataaaagtccctttacagcgtaccttcgattataaagttgaacagctgctgcacagccctgagttaaagccaggcatgcgcgttcgcgtgccatttggtagtcaaaaaaaggttgcagtggtgttggctctaaaaacatcaaccgatgttcccgctgacaaaataaagccgattatagacgtaatagacgacacgccagttttatctgagcaacatttagcgcttctgaaattcactgcacgctactactgttatccattgggtgaaaccattcatacggcacttccggctgcattaagacaaggcgaatgccctgataaaaccagcattaacatggttgagctgaccgaaaaaggtgcaaagctgccgtcgctaaaagcaaaaacccagttaagtttattaaagcagctagccgaatcgggcaaatcatcggttacagaattaaaagcactcggatttacaaaaaaaaccatcgatagcctgctcgacaaacaactgatcactcagtttatcgaacatgataaccagtggcagcaacgcccgccgacagtaggtagcaaacctgtacttaataaagaacaagctgtggcgtgtaccagcattaatcaagctaacggctttaccagctttttacttgaaggggttaccggaagtggtaaaaccgaagtgtatttgcaatgcctagaagaagtacttaaaaagggccaacaagccctagtattagtgcctgaaattggcttaacaccacaaacggttaatcgttttcgtcgtcgctttcctgatacaccgattatgctctggcactccgcactgacagataacgaacgcttacagacctggcgtttctgtgaaaaaggcagctgcgccatagtgatcggcacacgttcgagtattttcttaccttttttatcacttggcatgatcatcgttgatgaagagcacgacagctcgtttaagcaacaagatacattgcgctatcatgctagagacctagccgcttatagagcataccagcataatattgtgctcgttctaggtagtgccacaccggcacttgagaccttacataaagcaattaataacaaatatcagctgttgagcctcactgagcgcgcccaaaccagcaccgataaccagtttcaactaatggacatgaaaggtcagccagagcaagccggaattgcccatgcaagccttgcctatatgcgccaacatttagagcgtggcaaacaagtaatggtgtttttaaaccgtcgcggtttttcgcctacccttatatgccatgagtgtggctggctaagtgagtgctcacgttgtagcaccagtgcaacctttcataaagccattggccagatgatttgtcaccactgtggtgagcaacatcaggtgcctcatcaatgccccgattgcggcagcacgcagatttttccaaatggtaaaggtactgaacaaatcgaagagtttttaacacaaacctttcctgatattccgattagtcgtatcgaccgagattcaactcgtcgtaaaggcagcttagaaaaggcccttgatgatattaaccaaggcggtgcgcgtatcctcgttggtacgcaaatgttagcaaaaggccaccactttgctgatgttagcctggttttaatcttagacgtcgacagcggtttatattcgtgcgactttcgcgctaccgagcatttagcgcaacttgtcacgcaagtggcaggccgtgctggtcgaagtggtgaacctgggcaagtattattgcaaacccattttcctgagcatccattactacaagatttagtcaacaatggctatcaggattttgcccgctatgccctgacagagcgcgaagaggctcagcttccacccattaccaatatggctatggtgcgcgccgaaggacataacattaatcaagtggtcgattttttaactgatttggttcctgtccagaacgtatctggtatacaattgctcggtccgatacctgcgccactggaacgtgtggctggtaagtatcgctttcaattacatattcaggcgcaggaacgctcccacttgcaccaatatttagcgcaaatggtcgactacataagcaccagcaaattagcgcaaaaagtgcgttggagcctagacgttgatccgatagatatgatttaaaggccaataaaagagtcatggcacaacacgattacattaataaaaaaccagcaaatagaaataaaaagcaggctccggcgaaaaagccatttcctattattctaattttaatcgcgcttattttagtaggcgggtttagctatggcttatggtatatcaaacataatgctgaccctgaacttgtggaacaacaagccaatccgactaaacaagaagaaactgttattccgccacctaaaacacctgaatttatcaaagagattaaagagcacgaagttcaggttgaagtaaaagagattgaacaaaagggcccgtatgtaatgcaatgcggttcttttagaaccttagagcaagcacaaacattaaaagctaaaatcgcttttgccggcttggttgccgaggtaaagaaaacccaaggcagcaatggtgtttggtataaagtgcgtttaggcccttacgaaaccaaacgtttggccgaaagcgataaaaataaacttaaacgtatcaaaataatgggctgcggaatttggctttggacttgattttagttcattcacccatataaacacctcatcaatcgctttttacgagcggctttgccgctcgatgatgaggaataatcatgaccactattgtaagtgtacgccgcgacgacaaggtcgtaattggtggcgacggccaagtttcacttggtaataccgtaatgaagggcaacgcccgcaaagttcgacgtctttataatggcaaagtaatcgctggtttcgctggcggtactgctgatgccttcacccttttcgaacgatttgaaagcaaactagaaatgcaccaaggtaacctgactaaggcagccgttgaaatggccaaagattggcgtagtgaccgtgcacttcgaaaactcgaagcactcttagcagttgcagacgaaactgcgtcattgatcatcacaggtaacggtgatgttgtgcagccagaaaatgacctaattgcgattggcagtggtggtaacttcgcacaatcagcagccacagcgcttcttgaaaacaccgacctaagtgcacgtgaaattgtagagaaaagcctaactattgccggcaacatctgcgtattcacgaataatttccaaactattgaagaattgtaataggaactgccatgtctgagatgacgccaagagaaatcgttcacgagctagatcaacacattatcggccaagctaaagctaaaaaagcagtttcaatcgcgcttcgtaatcgctggcgccgtatgcaactaagcgacgagctacgcgccgaagtaacaccaaaaaacattttaatgattggtcctactggtgtgggtaaaactgaaattgctcgccgccttgcaaaacttgctaatgcgcctttcattaaggttgaagcaaccaaattcacagaagtgggctatgttggtaaagaagttgaaactatcatccgtgatttagtggatatttcaattaaaatgacccgcgaacagcaaactaagaaatttaagcaccgtgctgaagaagcggcagaagagcgcattttagatgccctactaccaccagcgcgcgacacctttggtgaatcaaaaactgaagaaaactcttcgactcgtcaatctttccgtaagaaattacgtgaaggccaattagacgataaagaaatcgatatcgatgttgcacaagctcagcctaatgttgagatcatggcacctcctggtatggaagaaatgaccaaccagctacaaagcatgttccaaaacatgggtggcgacaagcgcagtaagcgtaagttaaaaattaaagaagccttcaaactattagttgaagaagaagcagcaaaacttgttaaccctgaagagttaaaagagcaagctatcttcgcggtagagcaaaacggtatcgtgtttatcgatgaaatcgataaaatctgtaaacgtggtgaagcgtctggccctgatgttagccgcgaaggtgtacaacgcgacttactaccattaatcgaaggctcaacagtaagcactaaacacggcatggttaaaactgaccacatgttgtttattgcatctggcgcattccaaatggctaaaccatcagacatgatccctgagctgcaaggtcgtttaccaatccgcgttgagcttgaagcactaagtgctgatgactttaaacgtatcttaactgagcctcatgcttcattaactgagcaacaacgtgagctgttaaaaacagagcaagttgaggttgagtttaccgatgatgcaattgagcgtatcgcgaaagcggcttggcaggtaaatgagaaaaccgaaaacatcggcgcacgtcgcttacacacagtgatggaaaaactaatggaagaaatttcatttgatgcctcagaaaaagcaggttcaacactaacaattgatgccaattacgttgaacagcatttaggtgcacttgttgaagatgaagacttaagccgtttcattctttaatcaacaaattagcgttatactaaaaagcctccagttggaggctttttagtttataaatcgtagattcgaggctcacatgaaagaagtcactaaagtgcattatcacagcgttagtaaagtattagatgttcattttgatgatcagactattgcccaatttagtgctgaatttctgcgtgttcactcaccatctgctgaagtacaaggccacggtaatgagcagatgaaactggtgcttggcaaacagcaagtaggaattagtaaaattgagccggttggtcattatgcaattcgactggtatttagcgataatcataatagtggcttgtttagctggcattacttagctgatctacaagcaaatcatgatgcgctttggcaacaatatcaagccagagtcacagagcacgaagccaacaaagacagcgtgcctattaagtttgtgccttaataccttgtcgcggtatacacccccaaacaacaaaaaagcgcgatgacgaaaccatcaccgcgctctatttatatataaagtatcaagtaattattaaactttaaacttatcgattgcctgataaagcacacgtgcttgctcagacacctcttcgctggtttgtgcattagttgccgcgtgacccgatgcctcttgagcgatatcacgaatgcgtaccacgtttttattgacctcagaagcaacttggctttgttcatcaattgctgtggctatgtgagtactcatatccataatggtttgtacatcttcggtaattgaacgcagtaactcaccggctttgcttgcctgcgccgcgctttcgccaccttgtgtacgacattgctgcataatactcaccacttctcgtgtgcgaccttgcagggtcgaaataatgctctcaatctcttgtgttgagtcttgggtgcgctgggcaagtgaacgtacttcatcagcaaccaccgcaaagccacgaccttgctcaccagcacgcgctgcttcaatagccgcattgagtgccagtaagttagtttgctcagcgataccacgaataacatccaacacagagccaatcgtttcagcgtctttttctaactgcgacaccacacttgatgcattcccgagtgaatctgataggtgattaatttgtaccaccgtcgattcaacctccgcacgaccttgctgcgcacttaagttagttgactcagcttttttcgcagccgcttctgtgttgtgagaaatatcttgaatcgtcgcctgcatttcagtggcagctgtagcaaccatatctgcttcgtgaagctgctcttgcatacctgagcttgttgctgctgtcgtttctgataaatgctcagttgccacgttaagggtacttagcgcggtattaacttcataaatcagctttttgaaatcactgatcaagctattaaagtcgatcgtcatggtggtaatttcatctttacctgattgagaaatagacatgcttaaatcgttattgcgacgaatttcgttaattgtgtgataaacacgctcgataggttttatgatagagcgactggttaagtacacgagtatcatcacaataatactagcgagaataaatacaacgaaggcaattaattgagcttgtgaagcactcgattcaacgaactgtttagtttgttcagtaaattgattaacaatcgcatcactcatctcaacactgcgcttcatttcacctaatgcacctgactctaaatctagcccgagcgcaacctgagcatcaactaaggctttaaacttagcttgatatgtcgaaagcaaactgatgagcttattttcatagtttgcatctagcccggcactctttatttctgttttaaaattggcaaccagctcatcgaacttagtcatatatttcaaatcaaagcgcagcataaaatctttttcggcacggcgcagctgtagcataaatgtcagtaatctgtagttatcgcggtcatcaagcaatgtttcgacttgatgcacagcacttcttagctctccgtataaagcatcttttgggtgtagacctattttcttttgtagtaccacaacctcattgaagtcgtcatagtaagtttttgctaatcctttaaactcatcaagtttagtgctatccatgtcaagatcgtcgactaactcatctaggcgagcaattttggtttttaactgggtatactcattttcaaaaagctcaaggctgtcgatatttttgtaaaacaaaaagtttttttcatgcttgcgcatggcaagctcatgaatatcgagttcctctgcattttgaattgtttcattgagcttaagcatcatgcgtgactcaaaaataattacacacagcattacaaccattgcaaggccaacaacaagcgcgtttaactgtaaacgacgttttatagttaaattttgtaatacattcattcaaagtgccctatagcaacatgcatttcaaagtatagctaaactatttgaagcagctaataaaaagtagcctgaaaaggcgatgcattttccaatataaggaaccaacaaacaaactgtatttactgtaagttaactttttgccataaatgttggtgtaacttatctaatttctgccactgctttttccttacccattcaactaatggcgcgggatcactcggaaagttcaatcttttattttgtggtgattgcaaccaatcatccatcgcataggggttaaggtaactcataacatgggcagctcccatgcctagcagcgtttgtgcattaatcccctgctcaaactgcttgccaagcggcttgagtaacagctttttacctaactgtaatgcctcgcttgcaagctcaaaccctgcattaccaatcacaccaccagcgttggctaaatcgttaagaaacccaactcgtgacggcgctcgcagatgaatattaccgattgagcaatcttgcgcatcggggtgatagcagtaaaactcacgctcaggaaagtcctttaagtagtcgacaacactgtctaggttctcaaacggtaaatacactaagactttattttcaaccatcacaggattgtcatggtgatgactcgcgatgaaaggaggaataatattctcagcataaggttgccaatgaacaccgagatagacattcgcgggggcataattacggatcaacgcacgacgaaagaaagctcgaccaaacattggcactttatcagacaaaaatgcagcctgatgactcataccaataaccggaataccttgctgttttgctgcccacgctgtgataggttcaaagtcattaaaaaccaaatcataatgacgtaaatctaagcttttaatatctttaattagctgcaaagggcgtgcattttttaatgttcttaaactatcaacttgtcctgatttactggtaaatgataaacctctaaatgttctaaagtcggcaaaatcagccatatcaaagtaattttgctctttgcgcccggaaaatacgtagtcaacgtcgacccctaatgctttaaaggtggttgccatcacgcgagcacgggttatgtgtccgttacctgttccttgtattccgtacaaaattctcatatagattccaccaccatgactgctaaaactgcacaactcgaccccatacctgcgccaataattacatcagcagggtaatgcacaccgattaccacccgagatgctgctacacccgatgcccaaagaagccaaagcacagtaagctcagggaaatacatggttaaaatagtcgctataacaaatgccccagcactatgccccgacggtaggctaaactgatcacttggcactaaatacgcaccttgcactaagcagtcgcaaggtcttacccgcgcaattcgctttttagctaaaaagtaaatgggtcgctcaattgcaaagccaaccaatatactcatcgcaagctgctgaaaatgaagttgttcggtaaaccaccaaaacccaaggaacaacaccacataaagtccgccatcaccgctttttgataaaccaagcgctgactttctgagccaatttggcgaagcgtcgttaaacacacttaaaaacagctgttcatccactttggccaatttagtaagcatgttgtttgccatggtaagctccttgtcatactttgcgtctaatttttatactcatctcagcttaggcggtaaaaataacaattaggtgacgcttttgagacactaatgttgcgataacgaaattcctttgatttaaacgaataaaccagtattaagtcgttgttattgagttgtatcaaggtatactgggtactaaacagacagtctctttagaggatgaaaaaatggattacagcacttctgatttatgcgatcactttgccgacgtggtcgatgtgctcgagccaatgtttatcaattttggtggacgcccaagctttagtggccgagtgaaaactgttaaatgttttgaaaataacgagctgatccgcgatatcttaactacggacggaaccgatagtgtgcttttgatcgatggtggtggttcaacccgacgcgcactaatagatattgaactagcagaaatcgcccttgagaataactggcaagggatcatcgtttacggtgctattcgccatgttgacgaacttgaagagctagatctaggcattcaagcaattgcttctattccagttgctgcagacagtgaaggcgcaggcgaagatggtataggcgttaattttgccggtgtgtctttctttgatggtgactttgtttacgccgatagtaccggcattatattatctgctgaagaattagagttagaaataatagaagactaatctcagtgataaatccccttaaaatttatgatgaagcggcggtaaaacatttatgtgtccgccgcgccaatgaacaaaaagcatggcaagctcttgctcttcttgatacacatgtaaacgcctctcaggctcttattgatgccaaacaatttggtattcgttacgttttagttggcgtgtgtgaagatattgggcctcgtgctaacctaggtaatggcggtgcacagcaagcatggctagctttcttaaagcgctttttgaatcaaactcataaccaatttttaaaccatgagcgtgtattgctacttggtgaagttgcgcttgatgatttaaaccaacaagcagctaaccttgataataaaaacgacgccgacttagccaaactacgtgaactgtgtggcgatatcgacacccgtgttgagcaagtactggcaatgatttttgcagctggccttgagcccattgtgataggtggcggacacaacaactgcttaggtattttacgtgcccttagtaagcagcatggcaaaccagtaaacgccattaacttagaccctcacgctgattttagagactgtgaaggtcgccatagtggtaatggctttaggtatgcctacagcgaaaatcatctcgctgattatcatgtgatgggtttgcacgaatttaagaataatcaagcaattatgaatgcgttaactcaagcaaacttctcgtttgatagttatcaagacattcaagttcgtcgcaatatagacttatcaaccgcatgtaaacaagcacttaataaattcgataatgccccattaggcgtcgaagttgacttagacagtatttcgctaatgccagttagcgcttataccaattgcggctttagtgtgagtgatgcagaacactttgtgcatttagcagccagccaaacaactgctcgctaccttcatttatgtgaaggtgcaccatcacaacaccctgttagtttagaagcaggcatgaacgatgccggccaaattatcactgccctagtgaatgcgtatttgcaggcaagagaggcaagttagaaagatgcgagaaacgagataacgactgatttttggggaggtcagctcgaaacaagtttcacgcctacctgtagcagcggctttatgccgcgccccttaaattggaagcaaggtttgagataaaacgcgatgtaacgagtcaaacagctcgctaactctcccctagaaactcgctagcttcattactgatgctctaaatgccattgctttaaccatgacaccatacctacactactaagcgggtaattaaaataataaccttgcgctgcataggtgtttaatgacttaataaaattaagttgctctaaggtttccaccccttcacaaatcactttagcattattttggttatgcatagccaccacccctgaaacgaggctacgtatttgagtttggtgagcaaaatctgcggtaagcgatgctgcaactttaacatactcaacattcaaatttggtagtttagatagccaaacaggggtatcacctaatccatctacacacagtttaataccaatgctacttagccttgcaaccatggctttaccttgatcatccaagctcataaatagatcaagcgggcattcaataattaaagcgccgggttctaaatgatgctcggtggcaatacggtctacaaattcaataaactcttcatgtagcatctcaggaccaaacacattaatactgagtggcagctgcatgccttccatacgtaatgccatagcaagctctgctgctcgctcaatcacataagcagcaaccggatagctaaggcctgcaacacgaatatcatcaataaacttgttagctgctaagatcccttgttttggatgctgccagcgtaacaataattctaaaaactctattttgttgtcactattacgaaccactggttgaaaatacaactcaagctcactagcaaaatctaagtgcgccagctcacgtagccttgcttgctgctctagctgctcaatcatcatttgtggatgatatggcacgatagcccgatctgggtttgaatcaagtgcaaggtttgcgaaagaaataaggttttcaaaactgtattcaggctcattacagctaacgaagctagctcgcactttcacctcaatagtgcaatttgccacattgaagggttttaaggtcacttgttttatttgacttataagttgctcatgcaaatgcttttgttcctcaagagagcaaatgaaggcaaaatttaatccacctaagtgagcaagcttttctatattgccaacgccactactaatattaagcactgcatcattgtctaattgctgtttaatacgagtagcagactgagcaagtaataaatcaccaaagtcccgacctatatgctggttaacactttcaaatccctctaaacgcagcataacaagggcgcagttatgcgagtgttcttcaacccagctagcaaagctacgtcgtaaatcgctgcgatctggcaagccagttagtggagtactgtctatttcatcatggtaaggagtatcaactatgacttcttcactttcttctggttcttcaaagttaaaaaagccagacacagataaaacaataactgaaatcactagccaatacgcggaagtttcgagcaataagtgggcagaatacattactgtaaacgtaatcgccgcagcgacagtaaaaataatcgctaaccagttatttgttcgaaaagcttgccataaatgaaagcaaagactcattgctaataaaatgattaaccaaggaatagcggaactgaggattgccaaccccagcacaccattaacaactaaactgagtctaagtattggatgacgagtgacacacaacgcacaaatcattgccataaaaacacagcctgctaaaaacactggcactgcatcactacttaaatttacgagccctacaccgttactcgctaaactggcaatcaatgacatctaatccaaaaatacgtaaaaataacttctaactaagtctacccaaaatccacagatttaacagtttatttacgccgaattggtaacttaattgcgcagggtgggatatttgccagtgagcaatatcagcgcgtgcccccacttttaatacacctcgatcatcaagacccaaggctttggcggcattacgtgttacacctgcaagcgcttgctctggtgtcatacgaaaaagagtacaggccatattcatcattaaatgcaatgaacacaatggtgaagttcctgggttgaagtcggttgatatagcaataggcacctgatactgctgaagtaattcaattggtgggtattttgtttcgcgtaagaaataaaatgcccccggtaacagcactgccgcagtgcctgctttggccattgcttgaatgcctgcttcatctaaatgttcaatatggtcggctgataagccattaaattcagcaacaagttctgcaccatgttgattagataactgctcagcatgcaacttaacgggtaagttgtgctttttagccgcttcaaatacacggcgagtttgctcgttactaaaaccgacattttcacaaaatgcatcaaccgcatcagctaaatcagcttcagcaacacggtcaagcatttcaccacaaacaagctctatgtattcatcactgcggcctttatattcaggtggtaatgcgtgagcacctaaaaatgtggttttaacatcaaccggatgattttcacctaataagcgagccacttcgagtagtttaatttcgttttcgcaatcaagaccatagccagatttgatctctaccgtagtcacgccttctgcgtataacgcatttaagcgctctttcgcactgacaaataaggtttcgtggtctgctgcgcgcgttgctcgtactgtacttgcaataccgccgccattagcagcaatttgctcataactgacaccttgcaagcgttgctcgaactcttcggcgcggctaccggcaaacactaaatgagtgtggcaatcaattaatcccggtgttaaccattgccctttagctgagatagtcggtgttgctaatgcatcaaagtttggtaagtcagcttgcgaacctaaccaagcaattttaccttcttttactgcgatcgctgcattttctatagcaccgtaaggcgcatcaactgcaggatccatggtggcaatattggcatctgtgatcactaaatcccagtgcatttggctatcgttcgttgtatgcatttttcacctatacttatatctgctgcgagctttaaagcgcctaatcaaattagcttaaagtttaacaactcatcttgtatatacaagaaaattatgccaccttgtaacacactgttaacttacctgtgcactttcacaatgagcgtccctaagtttgcgcaaataaaagaatatattttggaaaacattcgatcgggtcaatggcaagaaaatagccgcgtgccctcagaaaacgaattaaccagccagtttcaggttagccgcatgacggccagacgcgcgttatctgaacttacagacgctggtatattaactcgtagccaaggccaagggacttttgtagcaagctttaagtcacaatcatcattgctcgaaattaaaaacatcgctgatgaagttaaagctcgtaacagtgattacagctgtacaattttagtgatggaatcaatacgtgcaattgcccctattgcaattgcattgggcgttgatgtagacagtcatgtttatcgtagcgtcatcgttcacaacgagaacgagcaacctctgcaagtagaagagcgctttgtgaacccggctctggcaaaagattacttacaacaagatttccacagcctaaccccccatgagtatttatcaaccagtgcgccattaactgaggccagacatacggttgaggcgattatgcctaaccaagaaatgtgcgaatggcttaatctctacaatgaagagccttgtttgcaagtgatccgccgaacgtggtcagcaaatggcattgtaagctttgcacgcttagtctcaccaggtagtaaatacagactcggcggtcacttaacctttaaaaagtaattaaattggcaattgatagtgaaagttcagcgcctcaatagccgaaccatcaatgatacgttcgccagcttcatgacttgtaaaggtgggtggttgattacccagttcagagcatttttgctggtagtagtccgcttttgttggatgcgctgggttaacaacgttataaatgctattggcgttagaccagttttcaagcactgaaaaaatcgccgctattacatcttgctgttgtaccatgttcaccacttgctgacttgagctagtaagctcttttcctgcaacaaacttacctgggtcacgttcggggcctacaagtcccgctaagcgcaatgccttgccacccgcatttagcactaattgctccgcatcgtataatgtttgttggcgtgctgattggcagttaatttctatgctttcgtcgtaacgaccattgtcagttgggtaaacacctgtcgaagaacataaaataaagcctttacaatttaggtgtttggcaagttcaagcccagcttgcaatgtatctaaataattactttctgagctgcggctacgcggtggaattgcacacacccaccatgctccttcaagtgatacgtcatgtttaagtacaccatcttcaagtgcaaactgacgctgaaagtcatgttcgtgatcgcgactacggtgtgtcccctgcacctgccacgccaattcctttgccttaagacaaagagcctgccccaaccaacctgcacctagcaccaccattttattatcattcacaaccatttagtaacttaccctatgtattttgtaatattttattaataactaccgttttgcaaagtagcgatttaagcgcaaatatgattagatagataactctaaccgataataaaaatacgtgcacctatgttaaacaatctctctttacgtaaaaaaatattactgctgattggcgggacgattagtgtactactgatcatcgcgtctagtttctttgttaatcatattgctgacctatctcgcaaagcgattcaacgcgaagctgatagctacttacaaagcgaacgactatcaatgcaaggttactttgctaaatacggtaaagttgttgaaaccttcgtaacaaatccgcatttagtaaactggtttgacaactggactaaacgtgatcaaagccttgataaccaaccaggatacgacaacgttaatcaagattttgttcgtatcagtggtaacgatgacaacattctatcggccttctttgcatcagcaacaacaggcgaatactttaaagaaaacgagcgaaccacccactacaatggccagccttattacgcttataaacgtggttggtggcaagatgctttaaagatcaacaaactttatgttggccctatttctgtagatttaaccacaggtaatgcctcagcggttgtacaacagccagtttataataaacaaaacaaacttgttggttttggtggggttgatttacagctcaacaatatcaacgacatggttgaggccattcgctttaatggccaaggttttggctttttactagatggcaatcaaaaggttgttcacttctctgagcgtactggccataaattatctgtgactgacgaaggccctaatggcaaagaaggcttagatgctctcgaaaaacaatttagcgacacatcaggctttagcgaattaaaccgcgcgatgaaaagccaaaaagatggtagcagctatgtcacatttaaaggtgagcaatattacgttgtatacaatcgccttgaactagaaagtccatatcttgattggtatgtcgggattttgatcccaactagcatgattgatgagccagttaacgatgcggtgatgacaaccactacatcattaatcatcatccttgcgattatcattgcgatgatcttttgggccacgcaaatgatcaccaaacctcttacaaaactgacttacatcatgcgtgatatcgcatcaggcgatggcgatttaacacagaaaattgaaattcatagtcaggacgaagttggccagcttgctcatcatatgaacaccttcatcgataaattacgtgcaatgatgctcaacactgctgcgcaagcagagcagctgagccaagcagctagtcagctgaaaattgtatcgcaaaaaaccaatgatgaaattcagcaagaaaaacaacaagttgatagtgtaagtgccgctgttactgaaatggcatctacagtactcgaaatttcacgtaatgcgcagcataccaataatgcagccgaagaagtgcaagccattacagtcgatggcactaagcgctctacacaagctcagtcagtaatgactgcgcttgcaagccacatcggcgaagcatctaaagtagttgcaggtcttgaacaagaaagtggcaacattggcgctgtgatcgacgtaatcaactcaattgcagagcaaactaacttactagcacttaatgcagcaattgaagcggcacgagccggtgagcaagggcgaggctttgctgttgtggctgacgaagttcgttcactagcaagcagaacgcaagagtcaacggatgatattcgaaatatgatcagtcgcttacagcaaattgctcaacaagcatcaactatgatgcaacagggtcaagagcgtgctgaaggctccgttgagcaaacgcaaattgtattgcaagcactgcaagatatcgcgcaatcagtgacaaatgtacaagatcagagtcatcaaattgcgacttcaacagaacagcaaactgtggttgcagaagatattaataatagcctggcggctattaaccaccttgttaatagcactgcggatcatgctcatgaattggcagatgaagcacgtgatttgaatgaattggcagcgtctttaaataagacagtaaatcagtttaagttataaagataaattgccgaagttattaaaaacccgatgtcacctgaagatgacatcgggtttttatcgtcagccttccctgttaatcgtggcgcaaccgctttcgcgtgttccataaattcatgccactgttgcttattccataaagcaactcctttgtcggtcaatccttgtgttggttgcgtttgtacttgttccatatagtcacctccttacgctagcttcatcctgtttggctccaagcctgagcttatcccttgctgtcatctccgttcactttatccataaagcgttgccattgtgcgctactccataacgctttgttacttccttgctgtcctttttgctgtgctacattgtccatactgtaaactccttgcggtttatcgtcctttactcctacagctgctccttgctgtgttccctgactcatccttgcttattaatacggtaattatcgcttagcgatgatatacacagcatgaattaaacctggaatgtaccctaataaggttaaaagaatattaatccagaactgcgcacctaaacctacctgtaaaaatacgccaagaggtggaattaaaaccgataaaataatacgtattaaatccatgactcactccttgaaatctattagcccagccaaagctgggctaatttaggcttgctgttattcagcaacaatcgttaattcatcgattactttgcgaacgtcttcagcgttttcagcgatactgattgctaattgcttttcagcatcagactcaacggtacctttaagtgttactacaccgttatcggtatcaacatcgatgtctgtaccacctacttctgagttaaataaataacgtgttgtgattacagtactgattttcgcatctgttaaatcactttctgttgaatcagctttatctgctttcattttcttagccttcatgtttttaacaaccgttaatttgttatcaacagagctaacaccatctaggctaagaacaagctcttcagcaagctctttatctaattcactatcaactttacctgtaagtacaaccttgccattcgttacatcagtgttgatgtcaaagttgttaaggtttgtgttcataagaagcacagtttctgccttaccatcaatccaagcatctttactttcattttcccaactgcttgcctgaactgacatacttgttgttgcaccaattactaaagcggcaatcatagatttgttaaaagtgttcataatcttctccttttgatttaagacacttttactaatgcgactatgatgccaactatttatttgtttaatttcaataccttaaaccctcattcagcgactatttatattcaattcggtaaagatttacaggctgctcggtaagaagttcactatattgcaaaaataaccatttagttgctgattttattaatctgtggttaatttaactaagtaacgttgacactataaaacacaacatattgatttataataaaataaaatttggcctaagctttgctttataacgaataacataaaaatcactttgataatcacaacagggaactaccatggccgttaaacttgaagatcgcccaatcgatcaagtaagagaagaagtaattgatcaactcatttataactacagtcatgctgttatttcagctgaagcatttgaacgccgcttagaccaagcaatggaagccaccagcaacgaagtactcgttgaacttgtagctgacttagagctaaaagctgatattgactacaaatcgcaaaagcatgcgcaatttaaacctcattatggccacagcagcgataacgaaagtctgcagcttcgtagcattttgggttcaaatgagcgcagcggccagtgggtagtgccaaaagaaattcaccttacaaactgcttaggttcaattgagctcgattttagcgaagcgattttccagcaccaacatgtcactatttacgtgaactgtattttaggtaacgacgaaatctatgtgccagaacatgtcaatgtggtatcaaagctgttcagtgttattggcagtgtagagaacagatcagtcgccttaaataaaggccaaggcccaaccatcaccattgaaggtaatgtatggctaggctcagtcgagatttcagttaaacgtaccatgaaagaaaagttcatcagctttgccaacagtcttaaagccagttggaaagagatgaataagatgtagtaaaagttgcgagttgcgattatgttaatgtggtcgtcatttatggcgacaagatattgcatacgtttcatcaatgacgcgctaaagcacgacctactagaatgcgcgcgaaataaatttcacgcctacgtcaaacgtgggaacagctttagccgtgaataaagtaaagctgttcggcgttaaaaggcccctacaccgtaggcgtcacgcttgcttggcgcgtcttacatacaacgctattccatcaatcaatacctgacctacaaacaacaccgctcggcttcaaactgacagctgaaagctcactaaacttcacccccacatcaaagacatttaatcgcacaaagaggttaagaggcgctgcgctttagaggaagtaaaaaatgatcttgaggttccctcattctcttctcattcacttctctttgtgcaaatactttcagcactaaagtacctcttacgaggcaggcctttggtaaaggcctaaaacaacaccgctcggctcaaaactgacagctgaaagctgacagctctagctacaagtcattattcctttcactcggtatatcactgaaatactctacaaactcaacttcaaaacctgcaggatcgataaaatatacatttttacgatatgggttttctggaccctgtttatctatttcataaccagcgtcaaccaaacgttcaattacggcattaatatcgtttgtcacataagcaaaatgagcaaggcccacttggtgccctgctaaatcacggttttcgtcttcaccgttatcgctcagagcaagatattggtaatcatcaccaaagtgcagccatttgcgcggtttgcctgaccatgtgctatcaccttggctacgcacccgccaatgcgggaacgcagctttataaaagtgcagcatggcatcaacattactaacaacaaggtttacgtgctctaaatacatggtagttttcctttttatttttaaactgccaccaagataaaacctcaagttaagttcaggtaaagcactttttcaaataaaaaagccccacaaacgtgaggctttaaaaattgagtagttattgatgaatcagctaccagcaacctgcatttgttcaatcaatacagagccggtttgaataccgccacggcgctcgatatcgccacctaaaccgactaccgctttaaacatatcttttaagttaccagcaattgtgatttcactgactgggtattggatttcgccattctcaacccagaagcccgccgcgccacgtgagtaatcacccgttacagtgttcacaccttgacccataagctcggttactagtaaacctgttcccatggtttttaagagtgcttttaagtcagcatgagtttgctcaactaaccagttatgaataccaccagcatgacccgttggtgtcattgacagtttacgtgcagcgtagcttgctaatagatatgtttgaagctcaccaccttgaataatttcacggtcgatagtttttaacccttccgagtcgaatggtgaagacgctaagccttttaataaatgtggacgctcagaaatatttacacaatcactaaatacttttgtgcctaagctatcaagcaaaaagctcgatttacggtaaagcgcgccgccaccaatcgcagacactaaatgaccgaatagtgagttggcaatatctgctctgaagataactggcactttcatagtacctagcttttgactattaagcttagccaatgtttctgttgccgcttcgaggcctacttttgcagcatcgtttaaatcatctttatgtcgcgctacggtataagcagaatcgcgctgcatttgctcgccatctttaccaatcaccatggtgctaatgctatgacgcgtgcgcgggtaacctgcaatcatgccatggctgttgccataaacacgcaaaccttggtgagaagaaaaactcgcaccgtctgaatttacaatacgctcatcggcgtttagtgccgcctgctctgcttgattgcaaagctcaataccttgctctgggcttacttcccacgggtgatacagatctaaatcaagtggtgcgaattcaagcagttctttatcagcgataccattgtatggatcatctgaagtgaatttagcaatatcaatggctttttcgaccactgtacgtaatgttttagggtttaaatcagccgttgaagcagaacctttgttattccccacataaacactaatacctaagccaccgtcttggttaaactctattgtttcaacttcgcccatgcgcgtactaacagacaaacctgacgtgctcgacatcgccgcttctgcagcagtagcacccaacttttttgcatgctcaagtacttcgcttaccgcgtctttcacttcagaaatgtgttgataaataggatctttcatcttgtgtgtcctaggttctgatattttttatagtgtagcgaatgctaacacactgcgagacgtgcatcagctaatattaatcattaactaaatgacgtataatagcgaatagttaagtttactgaatgagcatccttatggcgaagaagaaaaagccacttatcgaagaagaaattatttacgtatcaaaaagcgagttaaaacgtgaagccatgcaatatcatggtttgggtgctgaaatcgcgaaaatgccgaaaaagcaacgcgatcgcttaccactcaatcacgatttaaaagaagcccttgttgtttctgataaagtaagtgataagagcgatgcttaccgtcgtaacttaaactatatcgcaaaagtattacgtactactgaaaacgttgatgaaatccaagcgatgatcgatattatgctcaacaaaaacaaccaagcggatgttttgatgaacaaaatcgaaacgctacgtgatgatttaatcaaacaaggtgacgatctaatcaattcaacaattgatcaatacccttctcttgagcgccaaaaaatgcgccagttagtacgcagcgccgcaaaagaagtaaaagctgaaaagccagccaaagcgtacaaagagttattccagtatcttaaagatgcgattatggtttaatttgtatacagaaagccgcttaatgatagttttgcggcttttttataatcatttcggcgctaaaacaccttctacaaccccgtaggaacggctttagccgtgaagaatttacctataaatagatacaatcccaaaaagggtaatcacgcacacttttaacaattccggccctcaatgggtttgcgatgatgtacctcgatactccaagcaaatgttcttcgttccttattaaagaatcataatatcctggctgccaaatttttcgtttagaacatgtttgcttgtttatgagatatgaactcttccctttgacctcttgaatcaatcgagctaaaggtactttatcttgtaattgaaataaccagtgtaggtgatcaggcattaccacaaaacagatagttttagcttttatttcttctatagcccttagagtgttaattaaagctcgtgcattattaaagtcagagaaataacattttctatcaagcgttgaagtggtaacagagtaataatgaaatgggattgataccctatgctttcttagattttgataatgtgcggtcatccataaccctccatttattatcttaaatctagacaaagacgtataagaatcaagttaaaccctcgtatgaaccgctttagccgtgaacatcacgaacaaaaaaatcacctgaacattccggcgttaatacacctcctaaaatcccgtaggaacgactttagccgtgaacatcacgcacaacaatcatctatcatttcggcgttaaaacacctcctacaaccccgtaggaacggctttagccgtgaacatcacgcacaacaatcatctatcattccagcgttaatacacctcctacaaccccgtagaaacggctttagccgtgaacatcacgtacaaagatcgcctgaacatttcggcgttaaaacacctcctacaatcccgtaggaacggctttagccgtgaacatcacgcataaaaattatctataatttcggcgttaaaacgcctcctacgtcaaagctgacagctccaaacaaaaaaagctctgagcattcactcagagcctttttaaatcgataatcaattaccagatttttacgcgatcttctggtttgatatacatcttgtcgccttctttcacatcaaacgcttgatagaattctggcatgtttgaaagaataccgattacacggtagtggcttggtgaatgagggtctgtcattaggcgattacgtaactcttcgtcacggtatttacgacgccaaatttgtgaccatcccatgaagaaacgttgatcacccgtgtaaccatcaatcacaggcgctttttcatcaccaagtgataattggtaagcagtataggcaactgttaagccgcctaagtcaccaatattttcacctaatgttagctcaccatttacgctagcatcttcaaacggcttatattcattatactgagcaactagctgacctgtgcgctcttcaaactgtttaaggtctgattcgctccaccagttacgtaagtttccgtcaccatcgtatttcgcaccttggtcatcaaaaccgtgaccaagttcgtggccgattaccgcaccgattgcaccgtagttaacagcgtcatcggcttcaaggttaaagaatggcggttgtaagatagccgcagggaatacgatttcgttgttcactgggttgtagtaagcgtttactgtttgtggtgtcatgtgccactcagaacggtcaactggcttaccgagtttagcaatcatatcggcatactcccattcgctgtggcgaatgtaattaccgactaaatcatcgcttttaacttcaagtgctgagtagtctttccatttatctgggtaaccgatttttggcgtgaacttatcaagcttttcttttgcagcgatttttgtttctgggctcatccactcaaggttttcaatcgcaactgcgtaacctctaattacgttatcaactaactcttccatacgcgctttcgcttcaggtgggaagttatctttaacgtatactttaccaagcatttcacctaatacaccgtttgatgcatcaactgcttttttccaaagcggagattgctcagtcacaccacgaagcgttgtgctgtaaaaatcaaagttaagatctacaagctctttatctaatagtgctgcgtagttgctcacaaagtggaacttaaggtaattctgccaagttgctaagtctgtatccttgtagatacctgcaaatttttctaggtaactaggttggcgaatgattacctcttcagttttgatacctgacgcatcaagataagctgcaaagtcaaagtcgccagtaagtttgttagcatctgcaacgctcatcttgttgtaagatttagtagcatcacgactttcaactcggctccactgcgcatcagcaatgcttgtttcaagatcaataatagctttagccgcagattctgcatctgctacacccgctttacttaagatagctgtaacgtatgcttggtaagcttcacgaatttttgtgaatttttcatcgtcttttagataataatcacgatctggtaaacctaaaccagactgataaacatacatcgcgtattcgctcgagttttttgcatcattattgacataataaccaaatggtaagctaccacctttaatgcgaatttcagccattaaagcaacaagctcaggcttgctctttactgcatcaacgcttgcaagtactggcgttaatggtttgataccagccgcttcacggcctgcttcatccatataactgttatagaacgcagctaacttagcttcatctgaccccggtttaacattagtgtttgccgctgccttttctaacacttctttcatcgctttttgcgaatcatcgtaaagctgagtgaatgaaccatagtttgatttatcacccggaatttctgttttttctaaccattcgccgtttacgtgatagtaaaagtcatcttgtgcgcgaacagacttgtccatgttcgccagttcaatacctgaatttaaaggtgcttttgcttcagtgacggccgcagttgctggtgctttagtttcttgttctttttcaccacaaccaacaagaccgagggctagtgcaatacttgccgcggtaagtgttacttttttcatgggagtcccgtactaattattttttgatgtatttatcgaaaaactagcaaacctaattaatcattagtttttcgctttctccataataaacctctcaagcaaaacaataaaaccgaatatgtaacaattcttatcaaaaaaagataagcggcatatctgagcggtgagagggagaaaagcgataaggtgaagaccgtaatggtattcctaacaactcattagcgtatattttgcaagtcgaagtcgttatgagccgatgttttcacacatcagctttttaatgagatgaggctttcttaagctgtgcaatcccccaaaaaagcaccccagcccccgtgcatgataagaaaaagaacaaacccaagccgacaggcgatccccaaaacaaaatactgtataaaacttccatctctatatcctttattattattatttgaataacacgttatataagttttaggaacggctcgtcaagaagcattatccacgcattgcttgaatactctctagcgctttagcaagctgtgctcttagttttttataacgtatataaacagccagtacgataatgccattaatgccaagctggataagccataggctgtatgttttaaacattaccatgttaaacaaagcaacgattagcaaagcgcaccaaagaacgacacagccaataaaactcacttgccagtaatgaacttggtgcttcagctggttttctttaaaattaagcattgcattgacatctagcgtttctgctcgccaaagctttcgtcttaaacggtatgaccaaatcccaaaacctaaaggaataggcgctaatagcgcaaacataatggtttcataaatattttttgcctcaaacaacatggcgtaaatacaaaacacggttaccacaacacctaataaagagtcgattaaaccttttagctttaacttagtttgcgacttttgtgtttgtgcaattaacgccgcgctatccactttcggggttgcttgcacgaatgcctgctgccacttggctaattgatcatctgcttcgaatttattcactttattactccattaggctcgcaagttgttgtcttgctctacttgcacgtttagcaactgcatcttcagacaatcccagcgtttgagctatctcattttgattaaacccttcaagctgtaaagcaagcacctgccggtatttcagcgctaatttacgaagggcagccattaaatctaaactgtcgtctggtgatttatgtgcacttaaggcgtgggtgtaattaatactttcagagcttgccatctctttgcggttttgctctttaatgacatgatcaaccgctttattgtgagctattcgggcaatataggttttcatgctggcatcacctcgaaaggcaatatcgggagatgagccgctactttcaaaagcgcgccaaacagcaagcgacatctcttgaattagctcatcttgcagcgcttggtttatctcgtaggttgcagcaacacgcgccaacaacggcgcgtattcattcagcaacgagtttatttgaacgtcagctttcactgtacttccatgtttttattattatttaaacaaacgagtataggcacaaaagaaggtacatgctaatacaggccccaccaatagcataggtaaaagactataaggggcaacaaaggtaacaagcatattaatcaaacaaagtatgcttaatggtttaatcaccgttaatgcggttgtaatgctttcttttacagctgaaataagcgaagcattatttaaaagtaacaggggcaccacaaacataagcagcatatttatagggacaattgatacaaacataacccctacgcgccagcgctcaacatcaacaaattgaccagacaataataccgataactgctcactaccgatcaaagcactgccaacagcaaattgcaccagcgccagtaaaatacccacaacagaccaagtcgcaaccctgccccacttcgcccatgttgcattgtgcctaaatgaaaatctctggttattattcaggttaaacaacaaaggccataccgttgccataagcataggcgctaaccactttgatacggttaaacctgtaggtgcaggcaatagttgcaccacaccaggtacaatagcgaacagcgtcataagtaaaaaaagtttaaacggtgcatttttaaatagcccccatccttcttttaaccaaagagtagcatcactaaatggtgcgttcattgaatcaagttttagcgtattcacagttgatgttgtagtcgtcatgagtttgtccttttcgtaaaaatagatacacaagacactgcctatcgctaccaccaaatagaacaacttcgtgtcatttgcagctatagacgagacaaactcaaaaaacctgacaaaatatttttaaaaaaataaaaataattttatttcgttgaattttaaggataaaaaagaggtgtagaaatttttgagattaagctagtaaagctaataaaagaattttgggtctataagaggtgtttaatttaactatctatttgaaattgtgtttctttcttaagcaaaaaagtcccacatagggacttttaataattacttatggccagcaggtgctttatttactacctgtacttgagaggaaattgctcgctcaataacttgattataaactcgctttttctcacttgagcttgaatcaagtacaaagtctgaaagcttagaattttgagcttgctttggctttattaaatttgaaaacataggcactcctaaagctcgttttttgagctggacgatgattttatcaggctctctagatcttctctagtgaatttttcatctaaatgatgctcaattgcctgaacattatcattgttatgagaaatggcattagtaatgaccccctcgctgcgaattaaaggctgtgtttcaatccagtggtggaactatgatataggaaagagtgttttatcaccttgcttgatataaggtggcagtgagtgccgcgctttttgtttgcctgttctcacttagcttgttgtatagggtttgctcagagcagcataaagctatcgcaactccatctgctgtataaaattgaagtttgattttcggcatgaagcactccgataagttaccgtttagttcgagtgcttatctattgttgacataaaatatttttgtgctcacccccctgactttcggaggttttttgagtaattgaaaactcctcaaaatttaagtggaggatagaaaaccaaaaccgaagatcagggggcgtaagccaataaaggtaagttttaaagccacttagttagtgcgtaactaaaaaagttgtcataagacacataggctggctgatcaaaagcaaacaagcaaagcggcgctgagtctgttgattcaaggcgcaaactatagtggttttggtaattattaatctggctctgttgagcctgacagctacggatgtagctcctcttgacgtgtcgagggcagttggaaaacgctctttttcttgtttgctcaaattgagctagttcatatctaaactagcatattgatcttagattgcaagtagctatttcttcaagtggatgcccttccctcttctggcctttcgattttgcggttggatactaggtctcaaggcatcatgagaagtggccttgaggtaggcgactctgtgagtcgtccctacctcttcgagtaggtacgactagactacaattgatttccagaaaaaccccgtaaaaataaggggggttttctggatcaatatttagaaagctgaggtatagttaaaatcagtagctgcgcactagttccgtcgactttacagacgacctctacctaggtggccgtaggcttaatggtacaatcgggcgttgcccaagaggtgagtaatccacatagatgtttttagggtttttaacatcttccatctctaaggatagtcgtatctctcttggtacgcggctatagttttgactataagcgtcacaagtgtgcagctactttcatggaaatatgacaaagaagattccttagcaagaaacaatagttcaaagctattaatctatgaaaatactaatctgatcttcaagaaaaaccccctcttctatcatctcttgtttggtatctgtaggtgagttagtaaagaaaacaactttcaaatttaactcagctctggaaaagcatacgtaagcaagcttatatgttctagaaagctgcccctcagtacctgaaccactaactttaggtgataacattttagtaaaactatattgattccatgcagcttcaacatcatcaaatacagttattatattagggtactcctcacctttgacaccatgctgggtgctgtagggtgtgttgtcatttatgaaatgaaaatagttgataagctctgtggttttcgttgaaaaaaagttatcagctaaccaattccctttttctttatggtgaagctctttatcatactctatgtctagaggccatctatcgagagcttcggaaagtcgttctgatgctcttagcaaatctgaagtcaaagcaaacttaagtatttctccgattgttttttcttcccacatggtatttagagattctatagaatctttagcaagctcaatcattttttttatggattttgagttattacttccttcaggatcaaaagcgggactatgctgtcttaggattgatagcgccttaacagtattgcctgctcgatataactcgagtacaggtatcattacttgagtgaaaggtctaagaagataatgctctcctgattcataagcgtcttgtgcgtacgtagaagcaaactctccagtaaaaagcttatgaagcctttcaaaaccttgcctcctagcaatcatttgtctgactaggaataaatgctttacgtcatctttatcttgccaaccaaattctttaagaagttcctcatatttcttagcgactttatcaagctgctcatcactatacctatttcttgggccatcaggccgctcagactgaatgagatataagtgaacactccccttaacgtttgcgtttgaaccactagggacttgttcaatatcagtcctgtatcgattcaacaaatggattacttctgtcgagcacctatagttttcttgcttcttaattactgttgagccttgcggaccattaaagttccccataccacgatcataaatttgctgtacaggatctccaaaataaccaatcacaggtaaaccttctgaagaacaaacagcatttaaagcaaccactatttcttcaaaagtatcctgtgcttcatctataaaaatatagggatacctttggcctataattttctgaaacaaattattgtttttgatcaaatatcctgcgactttgataatatcatcatgacttaattccccttcgagatagttactaaaagctgaaagactgtcatatttaaatattttcaccgaatcaatgtgttcaagaacattttcatatttttgaattttagcgcgcgctgaaatagctgacttcgtatctttaccagtatctttcgctctctgtttttcaagctctgctggtattataaattcgactaagcatgctttgatactactagtaaaacgttttatttgagaccacaaaaagctgtgtaaagtagaaacctcaaaaatttcatcccaccctaaccgctcagatatcacatccacagccctgtttgtgaaggttatacaagcaatttgctgactctctcttcttaacattgcaccatacttttctcgaacataatcgagagttaaaacaagtgatgttgtttttcctgagccagcccctgcaatcacagaaaaactattacaactatcaatacattctcgaatataatgatctgcttctgttggaactatttttttttgttgtaagtcaagcattattcagtttcctcattaacaggttttgaattaagcttttcttctagccattgaagtccatcagcaatgtatttcggagtcttccatccactttcagaaacaataagatttatagcaaactcagtctttttaaatgatgaagatttaacttcttcgaatatcatttcgtgatcatcttccgcattaccagtaaattcgatttcactctctaaatctgaattcctaaatgccgcaatattttcataaataattgtttcttctagcgttcgcccatgcataagtacattttcaccataacaggttgtaagcgagggtccctgaaaagaaataaaagcttgtttattagcgacaataacttcatcttgagtaagctcaattaagtctgatattttgtctttattgaggaagtacttaattgaagaatttgatgtaacggcaccatcaaggtttgccatacaagcttttcggcttgcttgagggtcgactgaatcaatgtcagttataaccaagtacggtactcctaggaattctagtaatccggcgaaccgactggcataggccccaccaacttctaaagttgtaatataattgtgttctaaagaaggagctgatttttttatcatttctggtaaaagtagcttttcagcagcaccttctatcaaaatagcagcgtcggcaaaaaataagtcgcaatgagtaattcgtaaatatttttttaggaatttaagtacttcagttttatcaggcacatcaccgttagctgaaggcctatcaggtgaaaagctcctcatactgagtacctttgaagagtttaagatacgtgtatttacttgatcctgattttcagataaacaacgcttaaaatatcttactttctcaaattcaattttatcaagaatatgtgaagagtgagtcgtgatacagagttgaggctcttttttttgctcaccttgattactagcaacatctgaaataatagcccaaacatttgcaataaatgtttgttgaacttgggagtgtaaatgaacttccggctcttcaataaatataagttggcataagggcctgttattctctgtagttatccactgaaggtagaaatgacttacttgaatagcaatataaactaggtttttgaaccctagaccattgtaagcttctggtaattgatgttggctttcattatctatgtaaagtaactctgtattaccctgtaaagctgtttctgggcttagtgatgatacaagacgaagacttctatcattcacagatgggactccaagattacctaagatctccatcaaaccactaaagcttgtttcataatggtggctaaggttttgattattctcgtctataaccctatttgcctcttcattaatttcaggttgttgcagattatttttataatatgctccaaaagcactcgaaagcttgttcgatttagctaactcttgatcatccatatttctctgagcgtctacaaagtcgactcgtaaaattgatgaaagagtttttcttgcttcatctgcatcaagataatgaatagcatagtcttgacctgtttcctccagcacaaagtacctcaattgcaaatactttgacatatttcctgatatactaaggtactctgaaaggcttttttttcgttcgccatgttcgttaacagtaactatttcttgatattctttttttagtttttctttatcaaatgcaactagctctattcttattccaacatcagtgacaagtgttgttaattgaggtatcaaattaatgactcgcccatactctgtatcgggatcaatggtgaaccacatgtccattttaatagaggggaatgaagcaacttctccattaccaaaattatctattaaattaatttgagatgaagaaaagtcatgtattttaaactgacgagtctttaaaaagagtttgaatgcggttgtagctgatgtttttccgcaattattaggtcctacgaaaagggtttctctaccttcaaaatcgatttcaacactttcaagccgacgaaaattgttaaggcaaactcttttgagtttcatatatcatccatgaatcaagttctgtattaatgttagattcaggtttacataaaaacccatactttaaaagtaaaataaatcaaaattagcggtgatatttattatcaacattagtatttcttgatacatcaaggcatcaatcagctgataatattttctgcctcaaagtaatacttgagcatttaattttgctatattaaaaagtagcacagaggtagcacagggtaatttctgttagtaggtctttacttggaaagcttgtaaaaatggtggcccctcccagacttgaactggggacctaacgattatgagtcgtgtgctctaaccaactgagctaaggggccattgtattagcttttgctaattttgagatgcgtttaggagggttaactcactaaagcgggttgcagtataaaaagtttttgtaaccttgtcactagcaaaactctttattttaaaaatccttaaactatttgctcaaatagtaaactctttgttttttcaacgaccttaaagcatgtcgattgatttctagcctccgacattgttctagatcaaatagctaaatcactaaactcgttaaaatagccgctcaatcaattgcggagtgctgactgtgataaatttaccaagctgggatcaatctttgatcaataaatacaatatttcagggccaagatatacatcttaccccactgcgttgtctctagctgatggttataaccaacaagatatgattaacgcgattgcggcatcgaaaagccgttctttatcgttgtatatccatatccctttttgcagtcagctttgttattactgtggttgtaataaggtgatcactcgtcaccaatctaaagccgatttatacctcgataatttagcgcttgagattgctgagcaggcaacgctttttgccgattataacgttgagcaactgcatttagggggtggtacgccaacgtttttatctgcagagcaaatgagccgcttaatggcgttagttgagcagcattttaattttgctgatgatgctgagcgcggaattgagattgaccctcgctctttagctgatggcatgttagtacatctacgtaagcttggcttcaatcgtgtctcgtttggtattcaagattttaatgatgctgtacagctggcggttaatcgtccgcaaagcgtgcagtcagtaaaaggtttaattagcgaggctcgtgagcttggctttaaatctattaatgccgatatgatttacggtttgccattacagacacctgaaagctttaaagagacgattgcacagctgattgagctaaatcctgatcgcgtgtctgtgtttaattacgctcatttaccagatagatttgcagcgcaacgtaaaattaaagacgctgacttaccttctgctggcgataaacttactatgttcaaaaatacacttgagcaaatgttagcggcgggctatcagtttatcggtatggatcactttgctcgtaaggataatgaactagcgattgcccaaaatgaaggtaaattacaccgtaatttccaaggttacacaacacatggtcaatgtgacttattaggtttgggtgtgtcgtcaatttcgcaaattggcaatgccattttacaaaacgaaaaagagttaaagcactattacaaagccgtgcaagaaggctttggcaatgcagtatgtaaaggtgtcgctctcactgatgacgatactttacgtgcagcagtgatcaaacaattgatctgccagtttgagctggatattccctcaatcgaaaaacagtttaatatcaactttgccagctatttctgtgaggcattgcaagcactggacccattactagctgatggcttggtgtctgttagccaagataagatcacagtaacagcccgcggtaatttatttattcgtattatttgtatgtgctttgatgcgcacctacaacaacaaatcaagcaaactcgtttctcacgagtaatttaacaacaaaaagcagagcctaggctctgctgtttaattagcttaattcaacgatacgtcggcttaattaaatactacgttttcgctgcctggagctgctttaaactcttcaatgatacgtgcgcaatcggctttaatctcatcactatgctgctcttcagcacgccaacgagtggtgtccattttaaagatctcttttttagagtactttttacgggcatcgtgcgttggcatgtcttttacaacttcgtacattttgaatatgcctgggtagcgctcacttaactcaaactcttctgcaaagctgtattgagagatcagcacccaaatgcgtagacagccttcagagaactcacattgctcttcattcatcgcacgggcaattaaatgaatgctgtcagctaactttgcattacgctttgcttttgagtcagcaagctttagcgcatactcagcttttttcttagcgataagcttattttgctcttttagtttatacagaagttgtcctgcataaaacgcaagtcctgcgataattgccgcaccaataactatggcaataatcaagggtatgctcatcgttcatcctcatcttcgtcatctaaccattcgtttgctaggtcatcagataagtacttatcgaagtcagattcaccttcatcgtatgaatcatcttcaaagtcatcttcgtactcgtcttcgtcttcaatacctagcagttcacataactcttggtgacgtgcgatacgactattgaagtacttagcatctttacctgttaacagctcaccacgttcgtgacgctcaacaagctttaataagcgttcatcattttctaatgcttctagctcttgctctggtgttagctctggctcattaactttcttaagctcaaccattggttttaagttacgtttcatttcaacttttggttcagctttaggcgcaactaatgaaactggctttttgctaccaacacgtttatctttcggttggttattagcctttgtgttctctcccttttgcacgtcaggggcgtttcgagaacctggtttagcacctttggtctttttaactcgctgctccttcaacgctcgcatctctctaagtttttctttactcagacgtaccgggccatttgatggaattttacgcgactttttctttctactcatatcttgatcgtctcacttaagaggttgtgcacaacacctttagcggcattgtaatgctggcataaccagaagaattcggtgtgcggatgtggtttgtcaacatgacgaactgcgcacttttcatactctcatatcaatcgtgttaagttatttagcagctaaatatttaagtcgattggtattagtacaaacggtggctattgtaacaggacaaataaaaaggcggtagagaaaacatctctaccgcctactaatctgagcgccaataatttggacacttctcccttcgacttttagtctttattatttttattattattttttatccattttgttatttttaaaccttccgtgtagcattccattttgtttttattattaaacttccgtgagcttttattattctcggtcaatcctgacacttttttgttatttcctttagtacatcaaacgatgtaaccccctaaagatttgccgcaatcactttccttattgctttgtccttgttgtttttattgtctcagcgacagtggttaatttactcattaataattttgttacaactaatttatataacttttcttacagtcaaaagattataaaacgacaattaccttttaaaacaattcgttatattataaaaaaaaataaaaataagatttagctcacattgaagtgtgggcaatgtctcacaaggaagtaagaaatttcgatgagataaatatgaaaaaaagcagcttgcgctgctttttttacaatttgtacactttaatgccaatatttacattcggcaatcagactttagtgtaagccacctaagtattttgaaagaacttcgatgtctttgtctgttaattttttagcgatgtcttgcatcatgccgtttaggtcattattgcgtgtaccatcacggaatttttcaagttgagacttgatgtattctgggtgttggaacgaaatttttgggaatttagcaagtgatgtaccgttaccacgaggaccgtgacacgcagcacatgctggaataccacgctctgcatcaccggctttataaagctgctgacccacttctactacatctttaggtgttgaaccttcagacatatttaaagaagagaagtaagctgctaggtctttcatgtcttgatcgctaagcggcatagccataccactcattactggatccatacggccttctttgccgccagacgtcatacctaatttaaactcttgtaattgtttatagatataatctgcgtgttggcctgcaattttagggtagatattaaccggtgcattaccgtctgggccgtgacaggccgcacacgttgccgatttctctttacctgcgtttacatcgccatcaaatgctgttgcgttgcttgctgacaacgttccaagcaatatagttaaagatagtgctatttttttcatggtgaattctctgtttccgaccctgtatcatctacaatatggatgttgtgatttctatattctacacgataataaattctctggcacgttttctgcccactttaagctcataatttatagggatttgacttagattaagtttctatctagaaattttcccactatgtaactaaatttagcacgcttaaatacgcttttgaatgctgctttaatagtataaaatacgcgtcttaagtgaattttagtcactgttcaacattatttataaaagattaggagagcctgtgctcaaatctcgtatcaaatacaatactgcgtcctttgttactagcgcacctgacatctcacgcttgcctgctgatacggggattgaagtcgcgtttgctggtcgctctaatgcgggtaaatcaagtgcccttaatacgctaactgatcaaaagttagcacgtacctctaaaacgccgggtcgtactcagttgatcaatacttttgagcttgatgctgataaacgccttatcgacttacctggttatggctttgcgaaagtgccaatcgaaatgaagaagaaatggcaaaaatcgttaggtgagtacttacaaaagcgccaaagtttaaaagggattgttattttaatggatattcgtcatccactaaaagatcttgatcgtgacttaattgactgggccgttggcagtgagatcccagtacttgcacttttaactaaagccgacaaattaaaacagggcgcacgtaaagcacaagttttacaagttcgccgtgagctaagtagcttggaaggtgatattactgttcatgcattttcatcattaaaaggaacaggcttaccagaagttgctaaaaagctagatgaatggttcttagggccaattgaagttcaaactcctgaatctgaagaagaaccagaagcttaggccaagtaataacgcttacctaatgactctataaagtagccctgctcgtctgagcaggctatttcagcccattgataataaacatttctcgatactcttgccgctaacccatgtgctaactgtaaataaggtacctgcagattttcaaatttgcgtaattgtagtggttgcgatgatgtcactaaccaagtgcgttgtagattatcaacacagcataaagcctgcccttgctcggtctcttcaaaataccaatcaacaataacaaatggcacatcaatgactgtaatcgccattttctctactggcgtttttaaatagtaagtattggcttctttacaaagtacggaggcaaatagtttgaccattgcctcccgttgaatttcgctgccagcataaaaccacactccttgaccattgatctcaataggcaactgaccacaattgtctggttgccattgatcaaaaggtttatcaggctctgcaagtgcagcttctagctcggcaagcgactgcattacttatctttatcgagcgtcaaagaaaaagttacaggaacagctgttgcaatagatggtaaaccagcaagcttttgtagctgtgcaatgccttctgttactttgaaatcagctgcattaataatcactggtgagaacgaagaaactgtcacatcaccattgggtgacatatttgccagtacatcaatcgttaactcttttttattgccatggaagtcaagctcggctttcaaaccagttaatacatgttgtcctggcttcagtgctaataatgatttacttaaatcagcagttaaaactgcatgaggaaactcagctgtttcgaacaacaatttagtcatgcgctcattacggataggaattagcgtttcaacagagctaagatcgatcattaacttgaattgaccttgctcattcaacgtacctgatacttttttgaaatgatgcgcttcagcaattgaattctttttgatagatacaaagctaaccttgctttgctcattgttaacctgccagtttgcactagcaaaaggagcaactaataaacttgataatgataaggcggcaaaggccacagatttaaacataacgcattccttcgaagataataacaatctattagatggtatcacctgcgttaatttgtgcaatgaattgtatgataagaagagaaaaaacggctcgctcaataacaagcgagccggtatagcaaactggggagaagctatcaatacgttgcatcttttcagatgcatcatcaacaggatgtcctacaggatgaggacggcgcggactttaacaaagtccgcgttaaaaagaaattgcatccgcaaagaaaacgctcgatttgataaacatataacgaaactctaaaactatcttttcttgtttacctataattaacattacatcaagtggttatttaaggtatcgttaaattaatcagagaaaatagcagcattattaatacatgttgatggcaaaaacttagcacaagagtaaaaaggaatgaaaaaatgcctcctagcactagctaccatcttactcatttcgctgagcttgccctgtcacgcgaaaaataataacactcaatacccgattgttttggtacatgggctgttaggttttgatagcctattaggcgttgactattttcataatatccccagcactttatcgcttgatggccatcaggtttttgttgctgctgtgtcagctgttcacagttcagagtttcgtggtcaacaattactggctcaggttaatcatattttggcactcacgggcgcagaaaaggttaacttaattggtcatagtcaaggagcgcaaactgttcgctatgtcgcttcgatctcgcctaacttagttgcctctgtgaccagtatcgggggggcaaactatggcagtacacttgctgatcttattcgcgaagaaataaaaccaaactcaccatctgaacattcgtttaagctagtatttgcagcactaggcagcatgatttcgttactatcaggtcacagtgatttaccgcaagatccgttagcagcattacatagcttaaccagccaaggagcctctgtattcaatcaaaagtacccagaaggtttaccgccaacggcatgcgagcaaggacaaatgcttgccagtaatggggtgtattatttttcgtggagtggcacagcagcacttaccaatattcttgatccaaccgacttatctatgctgcttggatcaatattgatcgtaggtcaagatgatggcctgatttcacgctgtagtagtcacttaggtcatgtcattaaagatgattataaaatgaatcatttagacgaaatcaatcaatttataggtttgcatcatttacgcgaagtcgaccctgttgagctttatcgtcaacatgtaaaaaggttacaagagttggggttatagttaacgagtaatgatttatttttggttaagtcgggtcgctagaagtgatgttctatatacagaagcgatcagctttcagccttcagcggtcagacgcgcgaaacaagtttcacgcctacctgtagcagcgcctttatgccgcgacccttaaattggaagctagattcgagataaatacggtataacggtcaagcaaatcgctaacttttagtctgaaagctgacggctgatagctgacagctctaactttcccctagaaactcgctaactttcagtctgaaagctgacggctgatagctgacagctctcacctattgcgactattagtgtgcttgttgccagttgtcaccgctgtcggcttcaacaatcagtggcacatcaagagtggcagcttctgacattagcttacagatttcagctttgtagtcgtcaacacactcttctttaatttcgaacactaattcatcgtgcacttgcattagaagcttcactgacccttcagcttgtgcgtttacccactgatgaactttaagcatcgcttttttgatgatatcagcagcagtaccttgcattggcgcattgattgctgcacgctcagcggctttgcggcgagcaccgttacgggcgttgatttctggtaaatgtaagcgacgaccaaaaatagtctctacataacctttatcagccgctttttcacgggtagtttccatgtactcaagtacgcccgggaaacgctcgaaatatttatcaatataatgctgtgcttcatgacgtggaacatctaactgacgtgataaaccaaacgctgacatgccataaattaaaccaaagttaaccgctttggctttacggcgcatatcgctggtaacctcttcaaggctaacgccgaatacttctgctgcggtggcgctatgaacatctaagccattagcaaacgcggtaagtaggcctttatcttgtgataagtgcgccatgatacgcaattcaatttggctgtaatcggcagcgacaattttatggccaggtgcagcaataaaggcttcacgaatacgacgaccctcttccgaacgaattggaatattctgtaagtttggatccgttgaacttaaacgccccgttgctgttaccgcttgatggtaagaagtatgcacacgcttagtgcgctcattcaccattaacggtagtttatctgtgtacgttgatttcagtttcgataaaccacggtgttcaataattaccttaggtagcgggtaatcatgagcaagttcttgcaatacttcttctgccgtcgacggtgcaccttttggtgttttcttgataaccggaagctctagcttttcaaacaagattgcttgtagctgcttaggtgaacctaagttaaacttttcaccagccatatcataggcttcttgctcaagctctaataaacgttcgcctaaacgctggctgtgagctgccagcatgttgctatcaattgcaacaccggtacgttcaatatcagaaagcaccgacacaagtggtaattcaatgtcttcgaataccgattttaattggctatcagcatcaatttttggccataacacttgatgaagacgaagcgttatatctgcatcttcagcagcgtatggtgcggctttttcgagctcaatttgattaaatgtcagctgctttttacctttaccagcaatatcttcgaagctgatatttttgtggcctaggtatttaagtgccagcgaatccatatcatgacggctgcctacactattaaatacatacgactccaacatagtgtcgtacttaataccctttaactcaaagcctgcattcgctaatacacttttatcgtattttagattctggcctacttttgccttgttttcgtcagctaagattgggccaatttttgccataactgtgtctaagcttaattgctctggcgcatctgggtaatcgtgagcaaccggaaggtaagccgcttcaccggctttaaccgcaaagctcataccaaccaattgggcctgcatgtaatcaaggctggttgtttcagtatcaaaggcaaaaagctcggcgtcatttaactgcgcaactaaggtatcaagctgctcttcagttaagattgtttcgtagtgcgcatcagccactttaggtagttcgttggcttctgttggtacatctaaatgagtgtcagcatctttagggttatcaagtagctcagctaaccaacggcggaactcacattcaccataaagtgcaatcagttcatcacggtttggctcttgtagtttgaaactttcaaggtccgtttcaacttcaacatcacattttatggttgccagctcatagctaagtggcaaatgatcaagtgctgcagcaagcttttcaccaatcttgcctttgatctcactagcgtgatcaataacaccttgtaatgatccgtatttttgtaaccatttcaccgccgtttttggaccacagccatcaacacccggaatgttatcgactttgtcacccattaaggcaaggtaatcaatgatcagctcaggtccaacaccaaacttttcaaccacagtttctggatctgagatgctatcggtcattgtgttgataagcgttacatgttcatttactagctgcgccatatctttatcgccggtagagatcagcacatggcgctgttgctcagaggcaatacgtgcaaaagtaccaatcacatcatcggcttcaacaccttcaatactgataagcggaaaacccattgctttaataatgttatgtaagggcgcaatttgtgtgcgtaagtcatccggcataggtggacgattagctttgtattcgctgtacatatcatttctaaaggtttttcccttcgcatcaaacactacaaccatatgtgatggatcatattgtttgatcaaactcttcagcatatttacaacaccgtatatagcacctgtcgcttcacctttagaattagtaaggtgcggtggcgaatgatatgcacggaataaataagaagaaccatcaacaagaattagtggattttcagggatctgagccatggtgaaattggatcctaattgaataacattaaattgtttgtaagcatgccataaggctatgaagaaaacgactgtgaattattaaccaacaagcgtttaactcaatagcaacctgtggataactatgtagataacggacacagttaatcctcccaaaatgtaaaaacacttaggaaaattttattaagactatgtttttatttaaaaaagataatgcgtggttctttttttattatttttatccgatgtggaaaacggttttagcagcgatttaccttgtgcttattcgataccgaattaacatcccttttcataaccggaggagtattctagcataatggatcaaagatcatagcgatcctttatactttttttttcgttagctgtttatgaaatggcataaacagccattcatcatgctttgcgagtaactgagcatcaaaaattttttattttgtcgcctgactcgcataattgttacactagcgttagtcacattaaggagagacaaaaaatgaaaaaagttgctgtaattttagcgggttgcggtgtttatgatggtgcagaaatcaacgaagccgtcctaactttactacacattgctaaagcaggtgcaagctatcaatgtttcgctcctgatattgagcaaatgcacactattaatcatctaacgggcgaagaaatgactccaaaccgtaatgtattagtagaagcggcacgtatcgcacgtggtgaaataaaagcattaaccgagcttaatgtgaatgagtttgatgccttaatcgtaccaggtggttttggtgccgcgaaaaatttatctgactttgcagtgaaaggtgctgatgcccaagtgcaaaatgatgtacttacaacagcaaaggcctttgttgatgcaaacaaagcagctggatatatgtgtattgcaccggcaatgttaccaatgatctatggtaaaggagtcaaaacaaccattggtaatgatgcagatacagcagcggctattgaacaacttggtggttcacaccaaagctgtgcagttaatgatatcgttgttgatgagcaacacaaagtggtcacgacacctgcatatatgctggcgcaaagcattttagatgcagatgcaggtatcgaaaaattagtaaataaggtcttagaactcgtttaattatttatgttaaggccagcatctaatgctggcttttcttgcgctaacgcaaaaaaatgacgttttttatcaagaaaaagccttttagatcattttataaattgtggcttagcgttataatcgttctaatttccgtcagatatcgtgattgatcacgttcaaatcgaagtgagcaaggcaaaatgaaaaaactatcagctgcattattactgctagcaacaacggcatatgcacaagcgtatgacaactctttgactgaagatgctattaaaaagcgtctagcgccaattggttctgtatatctagaaggtgataaagctgcggccgctgctgagcctactggccctcgttctggtgaacaagtttatcaagcagcatgttttgcatgccatggtactggtgcattaggtgctcctaaatcagctgatgattgggctcctcgtattgctaaaggtaaagatacactattagatcatgctatcaatggcttcaatgcgatgccaccaaaaggtacatgtatggattgttctgatgaagaaatcagtgctgctatcgactttatgactagcaagtaacaattcaaaaactaatactaagggcttaaattttttaagccctttttttgtgcccatttttgctcgccaggctagctctgtcgccgaattagccccactattaattagtattttgttaacaactgttacttgacgatctaataaaaaagtggaactatataggacgatatttaaacaataataagatctggttctaaatcattggaagattcagcaacacacattgataaactagcccgtaaaaatgctcgtttaaaatcgcttttacaacagtataagcaatcacatcacctgcaaaatgctctcttacaattatcagagcaggccagcactgttgccgaattaaccctactctatccagctattcacgaaattttacaagattttattcctagtaagaattttttcgtcgttttacacaatcctgtttacgataacctcgaactgtcttattttgccgatgaaaaagatggtttatcggtgcctttaaaatatgagcagtactttaaggaaggattaacggggtatgtgtttaaacacggagaaaccagttactttactaaacaacaaacagagctagccgagcagcaaggtctgtttaaagtatttggaaccccggcggagcattgggtgggtgtacctgtataccgagataaaacaatcattggtgtaatggttgcacaaagttacgatgaacaaaatggctataccgagcagcaaattgaactactcgaagcgatgtcgatgtacttagcaacagcgattgagcgggtcaaaaaacgtgaattactagaatcagaagtaaaaattcgtactcgtgcactaacgcaaagtaaccaagccctcaacgaagaaattcaacatcggaaaaatgccctcgagcgacaacagatcctgtttaaaatctcagagctagctacgctcagtgaaaacttagaggatgtttatctgcatgtgcatgaaattattaaaacaattacatacgcagataatttatatattgcactgtatgatgaaaacacaaactggttaagctttccgtattgtgttgatgaatataataacaatgctaagccacgtccgtttgctaaaggctacagtgaattagtgctaagtaccgaaaaatgccagcttattgatagtaaaagagagcaagaactggttaaacttggcatagttgaaaagcctgttaatgttccccgagaacaaacagccacgagctggttaggtgcccctcttaaaacatcgcaaggtgttatcggtttaatagtctgccaagcatataataacaaacatgaatttagccaagatgactgtgagctcattacctttgtttcacatcaaattgccaacgttatccaagcacatttagccaatcaagcgcttaaacaaagccatcaaaagcttgaacatagagtggccgaaaaaaccaaagaattacgccaagctaatatgcacttgcaaatgcagatggaagaacgtaaaaaaatagagcaacagctttatcatgatgcccatcatgattctctcactagtttaccaaatcgcagtttattcttaactcagcttgagaaaacacttcagcactaccagcgctatccagaacaacaatttgcagtgttatttatcgatttagataaatttaaagacattaatgatcagcttggtcaccaagccggagatcagtttttaattagtgttgcagaatccttttcgcactgtattcgtgagcatgatttattagcgcgcttaggcggcgatgaatttgttgtgttgttgactcatctaacagagcagcagcaagcacaagatgttgctaagcgaattattgagataatgaaaaagccgttttgtttaaaaggtcaatgtattcaaagcggtgcgagtattggtattacttactctcaaccgagttataagcacactgatgaaattatccgcgatgctgatgctgctatgtattacgctaaaaatgcaggccgtaatcgatttgaatcttttcatccattgcttaatacgtcgctaactcatcacgaatcagaatcaatgcatcacttggatgatttgccaatgcactttagaagtgcagaaatcattacccttgatgagcaacctcacccagagtctttactcgaagcatttggtgaacaccctgtacttggcagtactagctttgaagttttgaagaagtttgcgactgatcgcgtgcagcactttgaagttgaactaaagctcattgaacaagcttttacgttaatcaatacgaataatcttaaaaaagtattattcccatgctcaggcttagtacttgaacgcattaatttcaaagtattgactaagctattacaagtaaatcatgcgagcaaaatctgtttgctatttaatgagcaagagatccgttatgcatcagcagtgcaaatagagaacttaaaagagcttatttctttgggagtatctatcggcttgaacgaatttgctaaagatcgctgtgaactaaacctgcttactgagttcgagttcgattacttactgttaagctcaaccttcagcaaacgagtactacagcaagaaaattatcatttacaactgcaaggtgtgctggcgattactaaactgcaaaatatccaagtaatcgctaaagggccgtctattttcaattaccgcaccttgctagaaaagcatggcttatctttgtttattggaaaacaacgtgcgctggcaccctttgatcaagtcgtgccaaacgcaaagtcgattacttcttaagcattgctcttagattagccacacgagcctgtcctttttccatacgctctgcttgcgatgacggtggctttttagattcaaaggctaggtcatcttgcggtaattcctgtacaaaacggctcaactcagtctctgaggtttcaccaaattgacggcgtaacttagcataggtcattaccagctcttgctgagcacgcgtaatacctacataagcaaggcgacgctcttcttcgacgttatcttcatcaatgctcacttggtgcggtaataacccctcttccatgccaaccataaacacatacgggtactccaaaccttttgaagcatgtagcgttagtaattgtaccgcatcggattcgtcttcttcttcgttacgttcaagcatgtcacgtaaggtcagtttactgaccacttcagcgaggttcagcggtggattgtctgcgtcccctgttagcatatcagtgatccaacgataaagctctgagacgtttttcatgcgcatttcagcggcttttgcactcggtgatgactcgtacagatatgcttcgtaattaatttgcctaactaattctttaactgcttcaagggtgtcaccacgtacagcgttatcagatagctcaaccacccaacgggcaaaaccagctaaagcattaaaaccacggccttttagtcgatgcgcaagctcaggctcaaaacaggcagcaaataagctgatatgtttttcattagcaagcgtacctagcttttccaaagtgaccgtaccaatctcacggcgtggcgtattgacgattcgtaaaaatgcgttgtcgtcatcttggttcaccaataggcgtaagtaagccatgatgtctttaatttctgagcgagagaaaaacgacataccaccgctgatcttataaggaatgcggttgctcatgagtgctttttcaaacactctcgcttggtggttaccacggtataaaattgcgtaatctttatagctggtgcgtttcataaatttatgagaaatgatctctgccaccactcgctctgattcatgctcttcatcacgacaaccaatgaccttgataggctcaccataaccaagctcactaaatagctttttatcaaactcatgagggttattggcaatcaaaatattcgccgctttaagaattcgcccagcacttcggtagttttgttcaagcttaatcaaacgtaagcccggaaagtctttactcaataacacaaggttttgtggtctggcaccgcgccatgagtaaattgattggtcgtcatcgcctaccacggtaaaacgagctcgctcacccactaataatttaaccagctgatactgactggtattagtatcttgatactcatccaccagcaagtaacgaaaacgctgttgccaacgctcacgagaagtggcgttttggctaagtaataaagtggggatcattatcagatcatcaaaatcaagcgcattataagccctcagttgattttgataacgcgcatacagctgggcaaataaagctttttgcggctctctggcttcgcgaatagcacgctcaggtagaattaattcgttcttccagctgcctatttgcatcttaagcaggttgagtaaatctttgtcttttttaagctcttcttcggtcagctcagctaatagctgattggtatcttgatcatcaaacaacgaaaatccgggcttaaatcctaaagtggttagctcttttttgattatctcaagcccgagggtatgaaacgttgaaacccataagcctttcgactcttgcttgccgagtgtttgcgtgacacgctcacgcatctcttttgctgctttgttggtaaaggttaccgcagcaatattgcgtgcttgatactcacacttttgcaccaagtaagcgattttattagtaataacacgcgttttaccagagcccgcaccggctaataccagacacggcccactaatatactttaccgcttcatcttgttttgggttgagtttcataagcccctaaagaaattatccaaagacaggacgggcaattttaccgtaatcactacactacgcctagccaataaggtaagattgtttttttacgtgactcaagggacgaacatgatcaacccagcaaaacttgaagaaatcgctaagcaaattactgataacatgccgcaaggtgtgaaaaaccttgccgatacaatcgaaggcaaaactaagcaagctattcaaaacaaacttgctgagatggactttgtaagccgtgacgagtttgatattcaaagccaagtacttattcgtactcgtgaaaaactcactgagcttgaagagaaagttgcattacttgagcagcaacttgctagcaaacaagacgaacaataaaaaaggagagcgaattagctctccttttttctactttattcggtattagcttttttcagccactcgttcaaatacacgtttaaccgcaataccataggtctcattagcttcttcagcacacgtcacaaccgactctaagtcattgaggtgaccattcgctaagccataaacccaaccatggattgttaactcttggcctttcgcccatgcatcttgcactatgttagtacggcacacgttacgtacttgttcaataacgtttaattctatcagactatttaaacgctctttttcaggtaatgcgttaagttgttcgatgtgtttttcttttacatcacctacatgacgaagccagttatcaattaaaccaaagctcgcttcatttaataccgcttgcacaccaccacaaccatagtgaccgaccaccatgatgtgttttactttaagcacttcaacagcatactgcattactgataaacagttatgatcagtgtgaacaacgacatttgctacattacggtgaacaaataattcacccggtaacaagtcaacgatttcattagccggtacacgcgaatctgaacaaccgatccacaagtactctggattttgctgcattgatagaattttaaaaaactcaggatcattttcactcgtacgcgctgcccaacgtctattattttcgaataaattttttaactttctcattgcgcctctttacgatgttttaataattagcttggatcaagatattccttggggtgagctgcttttcacaaaacgtactaaccgttacttgatacccttgttgttgcaaatataaagcacgatcgagcacgagccaaacttcaattgcccttctgaacacatgtcggacgagttcaacacgctcagttactcgttttcgttgtttccctattgctaaaaattcatggtaatcaatatcttctggcagtgataatgattttttctcagcagcccataaacaaaatgatttaaaagaatcagaaaagatcgctttgttcaccgacgggacactaacatagtgctgctctgccgtgattgatttacgcaacgcatcaaaaccaagccgccattcgacttcagtttttcgtactttatcaacacgactcggagcagtgacggtttcttgtagtgccaattttaaatcgcgatgagtcaacgcaagctggctttgctttgcaggctcgctcattgcttgataatcgttatccgtgaataaatgataacaacaaggagaaaagcttatttgctgggttttagcatcacttgcttgctgcataaatgtttgatgcaatcgaccacaggcgtgcaacgcaacggcatgctgttgctctttaaaatactcagtaacatcatcggtaagtacattagcttgcgaaaactgcataggtaattgttgttgattagcactgtgctgaccttgttcacacaaatgcgcttgtagttctatgctatgaatactcggtgctccattaaaagcgagcatgcgccctaaatgcccttttccagcacaccattcaagtactggatactgtgacttctgctggctaatcgctgcaacaaagtcctgtagttgctcgaacttacgccctttaatgccgttactgatccaaaatggaaactcatctcgggtttgttgggttgtgggaagttcgcataacgatttaagctcatcaagccccttaattgcctttgcaaaataggcatacaacgcattctggtcactatctagttcactaacttgttgatcgtcaagggcccataataaagacgaaagttcaggccaagggattgcatcataatcaaatgcggtacattgccagtactgacgggttgaaaaaagcaaagtatctaaggcagcaaactgctgagcaagggtcataactacaaaacgacaacaaataaaatgtagtataacagtttttacaagcgcagattacttctgttcaagtggatatataatggaatgcaggcaatgcttaataaaattgctaaaatcagcatccacgataattctaatccctcatcttgctggtgttgatacataaaaccggcaaacgtttgatcaaactcatcttggctgagtccatataagtcagcaatcaatcgccatttagccatcgacatattgccgatgttaattcctggcggttgaatataattgaccaacacatcagcttcatgggcaagttcttgaatactcttatgaaccgcatagtgctttttggtcaatgcaatcgtctcattcatgttgtgtaatgcatagcgccagcctttaatacttgcttgataaaagcggttaacaacatcaggattagctttgagcatcgactctgaagtatataaaatatcgctatacacatttagaccaaacttttgtgggcagattaatcggtgccctacaccacgcagcgtcattgtataaggttcattggtaacatacacttgcaccgcatcaagctcaccattaagccactgctcaattcctccttcggcgcttgcctctattaaatgttgataatctaatccagctttacgaagcatgactagtaattcggcgttttccaacgagctgactttactgatcttcttgcctacaaagtctcgaggctgaaaaatatctgagttatttttcaccatccaacaataaggtgaaaactgcagtatggctcctaaggcaacaactggcgctccttgttggcgcttttgcaatatgcctgagtgagtaattgcaaagtcagctttgccacttaacactttagggaaggtatcagggtcgtttggatcggcgggtaaaattgttacatcaaggcctgcttctttataaaagcctttctgtgatgccacataatagccagcaaattggaattgatgagtccattttaattgtagggtaaccttatccttactcaatgcactcaagctgcacattaaacaaagtaaccctaggtaatagcgagttccacgcacgcatcatccttgcttgaaaaccatccattaactataggaaaagccaataaaaaatcaaggctccaaaaggagccttaaatcggttttattgattagccgcttttacatcagctaactcttggccttgagtggttaaaaattgcgtaaaacatgggttatttgtttcatcttgaacgttataacccaaccggttcaagtgctcgttaaatacctcataatcactcggctcaatagcaaaggcagccagaacattaccaattgatccaccatgattacgatagtggaataaagtgatactccaattgctacctagtgtatctaagaagcgcgctagtgcacctgggtattcaggaaactcaaaacgtaacagacgttcatgcaactgagccggtgctttaccacccaccatataacgaatatgcaatttagccagctcgttatctgatagatcgcaaaacgtataaccattttcagtcagtgcgcctttcagctcatcaagctcttgttggccttgcctcaaagcaataccaacaaaaatttgtgcttcgcctggtcctgcataacgatagttaaattcggtgattgcacgcccacctaaagaagcgcaaaactgcttgaagctgcccttttcttctttgatagttacggcaagaagtgcctcgttcttttcaccaagcgcagttcgctcagcaacataacgtaaacggtcaaagtttaagtttgcacccgataaaatcgcagctacgtttaagcctttcacaccattttgttggcaccacttctttaaacccgcagttgatagtgctcctgaaggctccgctatagcacgggttgaaacaaagatatcttgcattgctgcgcagatttcatcgcccgttacagtgacaacttcatcacaaaacttttgcgctaaacgaaaggtttctgtaccgatgatttttactgctacgccatccgcaaagctgccaacacggtcaagctcaacgggtttgccagcctcaagcgcagcttttaaacaagcactctcgtcggcttcaacaccaataattttgatatcgggacgtaaagatttaatgtacaccgccatgcctgcaagtaagccaccgccccccacaggaataaagactgcatcaagatcattaagctgttgcattaattcacgggcaaccgtaccttggccaacaatcacatcaggatcatcaaacggtggcacaaataccccattgcgctgctctgtgagctctaaagcatgggcttttgccgcatcaaaatgatggccgtgtaataccacttcaccacctaaagcacgcactgcattgactttaatttcgggtgttgtaactggcatcacaatagttgctttatgccctaaaaaagaggcactcagtgctacgccttgtgcatggttgccagctgaagccgtgatcacatcagacccttttggcagcttgcccagcttatgaaaagcaccacgtaacttaaatgaataaaccggttgttggtcctcacgctttaaccacacatgattgcctaatcgcgcactgagttcagccatttcgctgacctcagtgacttttgcaagcggctccatgttcgcttggatgatagcgcgaaaataatcgagctcttgggacaccataattaacttagctcctcaagtttagctaaatcgcgcacagctcctttatctgcgctggttgcaagtaacgcataggctttaagtgcaggcgatacatagcgttcacgatttaatggtttatatgcatctttaccacgcgctaattgtttttgcttacgcgcttcaagctcttcatcagacaacgccaaagtgatttcacgggccgcgatatcaatgattattttatcgccgttttcaacataggctattgcaccgccgcttgctgcttctggcgaaacgtggccaattgataagcccgacgtaccacctgagaaacgaccatctgtgataagcgcacatttttcgcctaaaccaaccgattttaagtaacttgttgggtacagcatttcttgcatgcccggaccaccttttggcccctcgtagcgaataacaaccacatcacccgcttttacttcgccatttaaaattccttctaccgaatcatcttgtgattcataaacaacggcagggccttcaaaatgtagcatctcttcaacaacaccggcgcttttaacaatacagccatcaagggcaaggttgcccgataacactgctaagccaccatcttgacgaaaggcattttctacactgcggatacaaccgttttctcggtcattatcaagttctggccagcggcattcttggctcattgcttttgtagttcgaatacctgcagggcccgctttatagaatttttgcgccacttcgttacttggatcggtcgcgtcccatttagcaaccatctcagccatagtatgacctgctacgtgatcaactgataaatcaactaaaccagctttgcctagctctcggatgatggccatcatgccaccagcacggtgaacatcttcaatgtggtatttgtttgtcgcgggtgccactttacataggaatggtgttttgcgagacagctcatcgatgtgcgacatatcaaagtctacacctgcttcttgcgccgcagctaataagtgaagcaccgtatttgatgaaccacccatggcaatatcaaccaccatcgcattcataaaagcggtgcgatttgcaatagcacgtggtaataccgctgcattatctttttgatagtattcacggcataaatcaacaatgcgtgcgcccgcttcaacatacagctgcttacggtctttatgcgttgcaagtgtggttccgttacccggtagtgccagaccaatcgcttctaataaacagttcattgagttggcagtaaacatacctgaacacgagccacaagtagggcacgctgagcgctctactttttctgaatcttcatcgctcacagaggtatcagcccctttaaccatggcatcaaccaagtcaagcttgatatcgatatcagcaaggcgtgttttacccgcttccattggcccacccgatacaaagataactggaatgtttaaacgaagcgctgccagcatcattcctggggtgattttgtcgcagttagaaatacagatcatggcatcggcacagtgtgcattaaccatgtattcaactgagtcagcaattaaatcacgcgatggcagtgaataaagcataccgccgtgacccattgcgatgccatcatcgattgcaatggtattaaactcttttggtacaccacctgcttcggtgatggtttcggccattagttcgcttaactgattaaggtgaacgtgaccaggaacgaactgagtgtatgagttaacaactgcgataatcggcttaccaaagtctttatctgtcatccccgttgcacgccatagtgcgcgcgcacctgcacgtttgcgaccttctgttgttgttgcacttcttaatttagccataattacctcagttgttgcagtggcatgccactgacttcctcattccaaaaatttatttattcgcttaaccgtcgttttagcgcttaagcgacctgttgaattagtttatacgttgttacattgcctgttggtgaaactggttttcaatgctgacctgtcttacatcaaccaatttatttaactgtgatgttagtaaataaattggcttatcgctgtcgactgtcatggtgacatgaaaagttccatcagccatttctagattcattgttgttaaatcaaaaccgcgatgacgaacaacgcgtaaaaagcgctcaactgcgacactttgattttttaatgtaatcgttagggtgtgtttcattttactgtctccgtcatcatttcatcattggctgcacctggtggcacgagcggccatacattttctttatcatcaatacaagcatgtaaaatgtaaggaccttcacttttcactaacgcatcaaccgcagcatcgacctcatctgctttagtgatggtttgacctggaataccaaatactgccgcaagtgctacaaaatcaggattatccgaaagattggtttcagaataacggccctcaaaaaatagctgttgccattgacgtaccatgcctaaacgctggttatctaagattaaaattttaactggtaagttgttacgacgaatcgttgccagctcttgaatgttcatcatgattgagccatcacctgacacagtgatcacaaaatcatttgggcgagcaacttgggcaccgatcgctgccggtaaaccaaagcccatagtacctgcaccaccactacttaaatgattgcttgggtggctaaatttcatatgctgcgcaacccacatttggtgctggccaacatcacaacacactacgccggttgatggcattttttgacttagttggtttaacaaatatggagcaaatactttttcgcccgggtagtcgtaacgccaagcatgctctttcatcatactttcgatatgagtcaaccactcgtcaggtgtcacaaaacaatcaagttgcggtaatgaggtttttaaatctgccactaacgacgcttttacaggcttgcgtttacctacttcagcagcatcgatatctaagtggatcacctttgcttttgccgcaaacttactcaagttgccagttactcggtcgtcaaaacgggcgccgatacaaactaatacatcacattcttgcaccgctaagttagccgctttaccgccatgcatacctagcatacctaagtcataatcgtaatcaggtaacacactacctaacgcttttaaggttgaaaccgcaggcatatgtgttttttctaaaaactgcataagctcgttttgcgcatcagcggcttgtacgccaccgcccacgtaggctactgggcgctgtgcttcgcttaagatttgatttgctatagcaacttggtttgggtctagtttaggtaaataatcttctgcagctagccaagggtggaatggcacttgcgccatttgaatgtctttggggatatcaactaacacagggccagggcgaccgctttgtgctaggtggatggcttcttgcaggatttcggcaaggtcttctgcacgctcaaccatgtagctgtgctttgtgcatgataatgacatacccaacacatccacttcttgaaaagcatctgagcctatcgcagcggttggcacttgtcctgttatagcaagtaatggcactgaatccatcatcgcatcggcaagtgcagtgattaagttagttgcacctgggcccgatgttgcaaaacacacacctaacttacctgtgctacgtgcaaagcctacggccgcaaaaccagcaccttgctcatggcgtgtcaggtaatgcttgactggcgcaccgtacaaagcgtcgtaaataggcatgatggcaccacctgggtatccaaaaacatccttaacgccatgtttggctaataaatcgattgttaactctgcgcctgtcatcgtaaatcctcattcctcagtgacattgtgtatttgctgcgattcaaaccctttaaacgaaaaagccccccggactattaagtgcggggggctttttaaatgctttacttttctccaagcactaactagcccccgcggtaataataatcaccacgacgttaattagaataagagtgagtttgttagtaagcattatctgtaaccaaattctgttcatttgtagcggaaatctagccatcccgctgcctttttctattagtaccgcgacaagcccgttaagtcaacataaaaatcaattcaaaaaaacaaggcaaacgcgaatttaaagaaaaatatatgcacaaaaacaattattacggatttatttttcgatatcgttcgttttttgaaatttcatacctcgtaataagccattaaatgattgattaatttttatctaggatattgctgaatttctatttgagagcgatttaatttaacgaccaacaaaaaattagtttagtattgaaaataacgacagcttaaaaggaaagttatgaaactcattcagcatatcaaggttttgttttgtcttgttttagtgcttggctttagtcagcatgtttttgcagaacctggcttatggaaggtagaaaaaaacggggttgcctcttatttatttggcactgttcatgtgggtgataccagcatgaaaggcttgccaaacaaagtaactcaggcccttgataatagtgataaagtgattgttgaagtggatattagctcaatatctcctatggagatgcaacgtcgctcattgccatttatgatgctaaaagatggtaaaaccttacagtcagaattatcgccagctaactatgcgaaactgcaaaagtactttgctgacaaatcaattgatatcgcaatgtttaagaacttagcaccttgggcggttatgattacgatgatgcaaatggaatttcaacgcgttggattttcagatcaatatgggatagacaaacaggttcttgcttacgctaaagaaaataacattgccgtaggtgagttagaaactctagaacgacaaatggaaatgtttgaacacctagcgatcatgaacgacaaaatgattgaggaaacctttgagcaactcgctgatgtcgatacctactttttaggtctgattaaggcgtggaagtcaggcgacatgaaaacgttaacctctttttataacgaaagttttgacgactcacaatacggtgaattaagtgagcaggttatgctgattgatcgcaataatgactgggttgagcaactatcgactcgcattggtaaagaaaaactgttcatagctgtaggtgctttacacttacctgagcaacatggtttattaaaacaattaacagataaaggtttcaccattacccgtatctaatatataaacatcagcaaaaagcgccttatggcgctttttttgtgaaatcagccatctctaaatagttgtcgatgcctgcaattttatcactggcatggtgattaacgtaaaccacagtgctggtacccccggcgcagattttttctatcagtaacaacacgcgttgcctattcgcttcatcaagacctaggcatggttcatctaaaatcaataaactaggatgttttaccatagctcgcgctatcaataataagcgttggtcgccaaaagaaagctggctaaatgagctattttgtttgtcgtttaaccctagtaaggctaaccattttttagcgattgatagctgtgtttcagtggctttttgataaagaccaatgctgtcataaaaacccgatacaatggtattaagcgctgttatattaacgcgataatccatatgcaaggcatttgaaatataaccaatatgctgtttaatttgccagatactctcgccactgccgcgctgatagccaaacaccttaatatcgttgttataacactgcgggttatcgcctgtaattagattaagtaagcaagttttacccgagccgtttttacccgttaactgccaatgttcaccttgattaatttgccagtttagcttttcaaaaataacggttccgccaaaacttacagaggcatctttaagttttactaatatgggatcagttaaggctggcgcttgatggtcgttatctgcctcgggcacgtttaattcggtttgcgctaaatgtagcaatttaaaaagatcttggcgttgctctttcgttggctgcgctaattggtgagtgatctgagcatgttttataaacgcataatgatcaacaaagtcagggatttcactcaacctgttaaggacaaaaatcatcgtcgtgtatttgcttaattcagctaataactgattaagagtttgcagtgctgttacatctaaaccatcaaacggttcatccaaaataagtaactcagggcgtccaattagcgcttggatcagcatcagctttcgcgtttcaccggttgataggtcacgaaatgcattattcattttactatcaaaatcaaatgtttttatgagtagctcaagtaactcagtatcaatgtcatggtcgcttctggcggccaaaataatgtctttaactgtgcttagcggcgtaagaccatcaataatatcatcctgatctttatttagctcatcggccaataattgcttttgtctatcaggtgacaccacagcaactcgtgcaaagttattggtaaactggccttgctcaatacgcgagcaacctgcaattacagctgctactgctgattttcctgctccattttcacccagtaatacccattgctgcgctgctgatacagttaaacttaaatcacgtaaacgatactcttcattaccctgccccttaaggctggcattaacattaaccaactgaacatattgcactatgaatcctcattccggcttattactagcctgacgttacaacattcaacaaaaaaataaaaatcgtttaaaccttttttgaacatagctgcgactaaggtataaaaggtcatcaacaggaaacagacaatgaaaaaattactttatgtagcagctattggcttagcactaacaacaacatacgcaatggcgaaagattcacgtgaattaaatcataacttcgcagtgagtggtgcaagccagcttgaaattgattttccagtaggcatcttagaagtagaaaactatgacggcagcgaagtggtcgttactgttcgtattgagcctaaaaatgataaaggttggtttggatctgaggttgatttatctgatatcgaattaagccattcacaaagcgcagggtcgttgaacttaaaactagataacgatgacattcaacaaagctggtatgtaaaaatgccgaagtcaatggccattgatgttgagctgggtgttggtgatattgaaattaacgacgctagcaactcggtagatattgagctaggcgtaggtgccgttcgaattgatagtgcgcttgacgactataaacgtattgaactcgatacgggcgttggcgataccaaaattcgtggcttaaaaaatgatgcaaacactagtcgtaaagttgtcagctctcactcaagctaccgtggtaatggtcaatatgctattgacgttgaagtgggtgtcggcgatatcaaagtaactaactaaataccggtttatccctgtgagctctcggtaaataaaatactgagggctttttcgaccgagtcagcagaaatcggtttatatacgtgtaaattagcccctagttcatatactcgttgtaaatcatcattagaggtgttcgctgtcacaaccaagattggggtttgctgtccttgctcattacgaatgatatctatcgctttaaaaccatccattacgggcatatttaggtccataaaaattacatcatactgagtatgcaaggccatatctgtggcgattaaaccattttcagcaacgtcaaaactgtagttaaaatgcttaagtatgcgacctagtatcgtggcattaagaggattatcctcaacaattaagcagtttaaagcacctggcaactttgcagactgttctatgcccggtgaacttacgaagttaagatttataaccactttggcgccttgtggctgcgcattaaaaaattgaatgtcgccatttaatgctttaacaatgtgcttgactcgcaatagccctgtttttaagccttgaaaatgttgctcagttctattttcattatcttgtatatctgagggtaattcgtcaaaccccttaccattatcttgcacttctaatagcaggcgttgcttgccttgattagtcgctgtaattgctattcgcccttgcaccggcgtaaatttaaccgcgttatttatcaattcagcaacgacttgttgtaaccgcggatgatcagtaatgaattcgctgttaagcgaatcagataaactgacgctaagagtaatctttttctcgtgacaagcgtattcatagggtgcaatcgcttgttttaatgtttctaacaagttgccttggtcaagtttaggttgccactggcctgtggtcatttcttgtaaatcaagcaactcatctaacatcaccaccaagcggttagcacaatatagtgcttgttgctgagccagcttttgctcttctttaatatcaagagactctatggatgctgttaatccttgtaaaggtgttctaaattcatgactagtgcgagcaataaaacgctctctcgttttatttacctgttctgcataatctttttgttctttataacttgtaagtgcttttgtgattagattctccattggtttaaaaacaaatagtaactcaatgagtagtaataccattgcaataacccaaaacatcatttcgagaacggcaagtagtgtgaccttatgcactgacttttgctccaagagctttacggcttgatctaattttgtaagtaaggcttcaagctgattactggcaaatagtgagctgtctatttctaaataattttcgcggctattgagaagtaactgggctttactgatgtagcgtttaacgtgggcatcaagagctgtgggcggtaagaagtagtgagcctgtaatgattcgtttagataaatataatcaccttcactatcttgctgaattaaaaactggtgacctgcaataaactgatcgaccgcctgctctagcaatcgacgatgttgttgctgaaagctatcagcttcatgataaattaacgcattaccgtaaagagctatcttttgcgaaagcatgcgctgtttacctgcaatgttaatcactttcgcatctcccttttgcacatacaaaagggtttggatcaacgccgctgaagttgatatcaaaattgctatcgctaacaatccgaagcgatatcttctgcgtatatctgtgactaacttaaacatgttttactcgtttatttttagagtaattgtagatcatataatgcaataaagcccactcaaggtgggctttaaatatcagctaaataggtaaattaatttacctattttcaagtcggttataatcaaacaaaccaaattcgacgccgcgatactctttcgctacacggtgtaaaatatcgctgtattgccaaaactgtggatgcgtgcgacgaatagcaaactcactttttagctctctgtaggctgcttcatctgttatttttgcaagcccagatgcaaaagctgcaacctgttgttcattgtgtaaataccaaattgcttctgggtaatcacctataaatccaggcacaattgttacggtatcttcatcataagcacgctgaccttcttcattcaataagctcgagatattgtaatgagcattatggtggatcaaggtgtaggctttatgtttatcatcgctgtctttgaccaacacaaacgaaatttgtggcagcaagttaactgctttaacaggaagatcgttaattttcgccagtggttcaggcactttcgtataatcatagcgaggactcaaaattggtttgagtttctctttgagcatattataaagttcagactgttgatctgcggttttatattctatgcctgtaggctgactaaacgacaactcatcttcaaagaaactcgttaggctaggtggcgatttacgataccactgtgctttaatttctttacgtttagcttctggtaataatgcaaggtagtttgcttcaccttctaagcgtaaaaagtccatatacaaacgagttaataactgatgaccaatgttgccatacacatcaaaacccgccaccagcaagtaatgaatacgttcaaataacgcgtagtcgagtatccaagtggtctttggctcttgacctatccagcctttaacaaccgttgcgctatcgaaatgacgaaataccgtcagcgctgcattttggttatgaccatcaccttgccaaagtaaatcggttgtgaggtgctgaccgttggcaaacatcttatttgccagtgcaactttggcagacaagtatttgttttggcgttttgaatacttcacccagctagaaatcggcaaagcattactttcttcttctgcaggcaaggctagcgcatcttcatgttgtaacaacatttcaccgactttcggtgtcgccgccatttcaggcttcgcaaaacctacccagaactgatcgttaatcacgtttaacgcaatttgaccacgacaaacaggccctttaataaagcccataataataagctcagcttcatcaagcataaattgataacgcgagtttactggaattgcagcaaaggctttaaacgggtttgatgccacttcaggcttataacttggtagcttgtttacttgataatcagcttcaataaattgtgaatgtaagcgtgcaagcttttcgtcatttaatgctaaaggtaaatgtgttttcgctaaaatagtcgaacggtcatgcattaaacgataataaactcgctcaactttagggtcttcatatgggcgacgggtgctaatgtgtttgatctcttcacccggcggcgtcgaagagcgcaccaacttaaagtagctatgtttatcgccatgctcagggaaataaatatgcgctaagtaccagtgttcataaatatagcgagcggcaagctgatgctttaaaccatcttgatttaagaatgcttcccagcgttcaacttgttttagtacgtccttttcaggaggatctatatgagcaagatagccgccttttctaagccacttagccagatgttgaaactcttcagttgaaataccaggcaacccataaggcataccgctgtgcgggttatccttagcaaatgagtcaaactcactcattgtggtacatgtttgctcacgatcgagtgaaaaatcaaactcatcgcctaaaatagcttgcttaggcaatgggctactttgcttaagcactaaggcattgtaaagcacgcttccggtaaggtttgcctctgctgtttggattctttcattgagtactggagtgaaacctttctcacgccactgagcggtcgttgtcgcatcaaatagtaagcgacttggctcttgcgctaataatcgtgtgccgtcataaacacgctctttacttaaaccacggtcgataccttctacagaagatagcttgagctgacacggtgcgtcataacagccatgacacaccacacaacgagtatcaagaacaggcttaacatcacttaaaaactcagcaccttcaagtgttgaagcagcaacaacacgctgttgtggttgttctttaccaaacagttcatcgtaatgagcggcacctaaatatgcacagccacttaatagaataaggccaaatacggtggtgaggagttttctcatccttcctcctcgatatcttcaatgtcatcacctaaatcgaaggttggcatcatatcgacttgcggcgacacaaaggtttggtcgttgtcgcagctaagcatagcgcttaatagtggcccacgaactaaactcagttgcgcgctgtgctcaccatcaattaatacttgataatcatcatttaacgcttcaagacgatattcattaatggcaattgcgacactgctatcaacagctgggttttggcaaagctgtgcgagtaactcttcgctaagtgttacatgtaataataaatctggagattcgatatcgcggctgtgaagattttcatcgaaataaaaaagtggaagggttaaatcgctattttgctctaattccatgtgcttttctctacatcaaaatgactttcaattgtacgagtatagcaaactataagttcaataattagcgaaagttatcagccgttagcagcttaatcactactaaccagctgaagataaaaaaagcagaaaaaacaactaccaaggtagcgtttcgccatttgaatgccaaaacccaccagtgttgcttagctttaattcatcaatacgcttaatgagccgctctgccgcagtttcggggcttatgtcgccggcaaaattaaccatttgcgtttgtacaaagcctggatgaaataaccctactgcaatttctttctcttttagctcatgggccaaactaacactggcggcattaagtgctgcttttgacatccgatagccaatgtaaccgcccgagctattatctgcaattgagcccatacgagatgtgatcatcgccactttggcatcaatacctaagctttgcagtaatgcatgagtaatgcgaattggtgcgatactgttaacgctgatttgcttttcgatggcagcaaagtccatgtcagctaatgtttcgttatgaaaaataccggcgttattaaccaaaatatcaattttgtcgccgtgtaagtagttggcaagtgttgcaacatcatcggcgttagatacatcaatgtcgctaataatttttacatcgagtgcttgtaactcttcgcttggagtgcgaactactgcactaacacggtaaccttgagctaaatactgtttacaaaaattaaggccaatacctttattggcccctgtaaccaccacatgcttagtcatcaatctgctccttagttggcttttctatacccaagtcacctcaaggtgcgagtttctgcatcttcaggtggtttgggtatatatataccttgggacagattggcaaaaaccaagggcttaagttaattcatcaatggttgacttaagaatggaaaatacggccccttggggatcggtaataacactaaagcgtccaacatctgggatgtctgttgctggcacacaaatagccccattaagctgcgttgctttggcgactgcctgatcgcaatctgctaccgcaaaatacggcatccaatgagatggaatgtcatcgggccattcgttggtcatttcaagcatgcctgcaatcggttgctcatcgatggtaaataaggtgtagtccatgccctccatgggtttcacctcaaactgccatccgaacaactgacaataaaagtcgcgacttttttgcatgtctttcgacacaagctcaaaccagtaaggcaagtttagctcttgtactcgtttagccccgatatgctcacccgcttgccataaggcaaatgttgcaccgcccggttcttgcagcatcaccatgcgacccgctgtcattacatcatgtggccctgccaaaaccgttgcacctaatgattttgcaagctctgtgctttgatcaacatcatcaacagcaatatataataaccaatgggttggcatctcgctcatacttgctggcagttgatacatagcggcaatatcatcaccttgcttttgcagcatggtgtaatacatatcttcgcctattggctggtcgtcaaaaccccagtcaaaaagttgcgtataaaactgctttgcagcttgccagtctttcgcgcataactcggcccagcagaaagtacctgcagggtgttttgtatttatttttgtcatggctgttcctccttggttaaacttaagctacaatcgcaaaatttaccaatcaaaccaaacaatagttgtggcatttcgttgaagtacgtaatttttccttagctaaaacagacaatgaacagcgctagcaacgctaagttacagagacaaaaatgccgctaaaaaagcggcattgcaataattaattagtgatgatggccatgctcacctttgagctgattaccttgcgcatcataaaaaccgctcgcaccatgttcaacaaaaccttggttaatcattttagctaaaaatggatcgctttcattatcaccgatatctgcgtaatcggttgtttgatagttatcccatttcgcaaactctgcctgcacatcttgttgattatgattgctggctgttaacacaatctctcggctatagctgggtgttgaaattcgaagtgattttagtaatttttgattggcaagccagcttagctctactttgctttggccttgctgctgggtgtaatactctgttagctcacaaccttcaccggtgcttttttggtgcgtcatagaggctaaaaatttatcgcttactaactgatatttgctactccaatcttgctcaccttgaacttcagatggttgatactcaataccacgctgtgcgtcttggaagtaacggattgggcgaacttgttgattacgtaactgttgccacagctcaataaactgtggattttgcttagccacctgatgtggtgtacgccaaagtgtaaaagtattttcagtctgctgcttattagcaacaatagctgtagtgactttgtagtcagcttgcgtgtaacctgtgttcatatcgcattgcccagcaacggctaatgggcttagtaatgaggcaattaagatagctactttcacggggttctctttatatttgatttttaattaactaattaagtcagggaggctcaaagcctcccaataactcattactgtgctaatttagcatcggcttgcttaacaaggtcggctgcataatccatcacgtggaaaataaggctttgctcattagtacctgttactaaatgtgcacctgggcccactgcatacacacccacatcttctgctgcatgtgtttcagaaccaagcggtacaacagcttcttgatggaagcctggtgtggttgtatcaacatcagttaaatcaacacgaccggtcactggcgcaaagtcataacctacatcagcatctgtttcgtcacctaagtcgcggaaaccgccaccattggtatacccaacggttgtgtatggcatgttatctgcggcaagtgatggctcatcactaccaactggtaccactttacctaagattgggttaccacgttttgggtagcccgcaatggtaaatacgtggctgtggtcagctgttacgatgattaacgtgtcttcgatgctggttttatcaagagcaacttgcacagcttttgataactcaacagtatcgctcaatgcattataggcattacctgcgtggtgagcatggtcaatacgtcctgcttcaacagttaagaagaagcctttgtcgttgttatctaatacatcaattgcttttgctgtcatttcagaaagtgacggctcacccgctacgtcgttcgcgcgatctgcttcgtattgcatgtgagtttcattaaataaaccaaatacacgttctgtcgtatcagcattgattgcatcaaaaccggcttggtccatcacatactgacctgcaggatatttagctttccattcagcagttaggtcgcgaccatctgtacggtcaccttctaccgagctcactgcatcggctgagttataagctgcatctttaggtaagaaatggcgacgaccgccgcccatcacaacttctaagccatcaacatctaggccttcgtaacgagcttcgaggtttgcttcaaagttaactaattgcgatgcaatatcttcacaacctgctgccactgctgcttctggcatatcagatacgtcttcccagttacggtcagccgattttgcatacgttgctgcaggcgttgcgtgagtgatacgcgctgtagatacaatacctgtcgacttacccgcgatctctgccagctcagtggcagtaactagctcattacccgcaactgttgcacagttaccgcgttcgatattttcatctacaccaatcacacctgcatcagtttttacacctgacgccattgccgtcatcgtacccgctgaatctggtgtttgtgcgtcaacgttataggttttagcaaaaccagagaatggtagtttttcaaagctaagttggtgctcttcacccaacttaccttctagctgacctgccataatacgcgcagctgttacggtcgaaatacccatgccgtcaccaacaaatagaatcacgtttttcgctttacctgactcttttacaactgcagcaatattttcttcgctagtagcaactttaacttgtgctgacttaaaccagtcattgtcagtcagtggcgctaattgcgatgctgttaacgaggttgccggtgcattacatgacactgttgtatcagttacttctgctgagtctagctcaccattatcgttgctatctgcacctgttagggtttctgtaccaccgtttacacactgctcagaaccaaccgctagagtattttcaacagtcagtgtttttgttgagcttttatcgtcatcatctgagcagcctgctaatgccactactacagcaagagaaattaaatttagttttttcatcgtcgtcgccattattcttcaattagttctagagcttggttaatgatgtggaaaattacgttttgctccacaacgccttgtgctagttgcgcaccgggaccttttgcatgcagtgaaatatcttcacctgcgtgggtctctgaacctaatggcacagtggcttcttggtgataaccaggtgcagtcgtatcaacccccgttaaatcaacacgacctgcaaatggagcctcgttgtaagatacttccgcattggtttcatcacctaaatcgcgaaagcctaaaccattggcgtaaccaacggtggtgtatggcataccatctgctgctaggcttggttcttcactgccaacggctactactttacctaaaattgggttaccacgttttggatagcctgcaatagtgaatacgtgactgtggtcagctgttactaggataagtgtttcttcagggttagtattttcaactgctgtttgcaccgctttagcaaattcaacagtatcgcttagtgcattaaaagcgttgcccgcatggtgaccatggtcgatacgacccgactcaaccgttaagaaaaagcctttttcgttgttctttaagatatcaattgctttgccagtcattgcagataatgacggctcccccgctacatcgttagcgcggtctgcttcgtattgcatgtgtgattcattgaataatgcaaatacacgcttggtatcagcattgagcgtatcgaagccagcttggtccattacgtacttgccatcaggatacatttcttgccattcagcagttagatcacgctcatccgtacggtcaccttcgacttcactgacagcatcagctgagttgaatgccgcatctttcggtaagaagtgacgacgaccaccgcccatcaccacttcaaggccgtcgacatcagtacctacgaagcgtgcttcaaggttcttctcgaaattaacaagttgtgaggcaatatcttcacaacctgcttctactgcatcagcaggcatatcagatacgtcttcccagttacggtcagctgattttgcataggttgcagctggtgttgcgtgggtgatacgggctgttgaaataacgcctgttgctaggcctttgatttctgcaagttccgtagcagtgattaattcattacctgcaactgttgcacacttgccacgctcaatgttttcgttaacaccaattacacctacatcagttttaacgccagaaataatcgctgtcattgtgcctgcagagtcaggtgtttgcgcatcaacgttgtaggttttgatttgcgccgagtaagggaactcttcaaagcttaataagccttcttcacccgacttaccttccatttgacctgccatgatacgtgacgcagttagcgttgagatacccataccatcgccaacaaatagaatgacatttttagctttaaacgtttgctcagcctgagctgccgcttctttttttgttaatgtagcttcagcggcactataccaatcattttgtttttgactgtctggtaacacacctgcattggccgtcgctgacaatgccaacgttaaaccaattgcagtcgcaattttattaattttcatcgttacgttccgttagtacgttatttttaagagtttggagctaattaagctgcgcttggttaattagcgcagccatcctatgagtgttttgttactgaaaaagtgacttttcatgacaaaatgatgaaaccaaaaaaagcagcgcaagaaggtaagtaattagttttaggggaaataaataggctagttgctagatatgagttagcgaatttgcgagggtaaatttaaaggggcgaggtcaagcctaatcagaggaaaggttatttgagttgataaaagagcaggtttatatggattgtgttgggtttcgcttcgctcaaaccaacctacccgaacaatgaacagagtaaatccgagtgaatattctcaactaaatatgacggctgatagcttttctacaggcattaaaaaaggccgcctaaggcgacctttttataagctgtgaagctctatctgttgatattactcaacgatagatgcaacaacaccagcaccaactgtacggccaccttcacggatagcgaagcgtaaaccttcgtccatcgcgattgggcagattaactctacagtcatcttgatgttgtcaccaggcattaccatttctacgccttctggtaactgtacgtcacctgttacgtcagttgtacggaagtagaactgtggacggtaacctttgaagaaaggagtgtgacgaccaccttcatctttagaaagtacgtatacttctgaagtgaatttagtgtgtggcttgattgaaccaggcttacaaagtacttgaccacgctcaacgtcttcacgcttagtaccacgtagtagtgcaccgatgttctcacccgcacgaccttcgtctagaagcttacggaacatctcaacacctgtacaagttgtcttcgtagtttctttgatacctacgatttcaacttcgtcattcacgttgatgataccagcttcaacacggccagttacaacagtaccacgaccttggattgagaatacgtcttcgataggcatgatgaatggcttatcgatgtcacgctctggctctgggatgtatgaatctagcgcgtctgctagttcaacgatcttgtcttcccactctttctcgccttctaacgctttaagcgcagaaccttggattagtggtaagtcatcacctgggaagtcgtactcagaaagaagttcacgaacttccatctcaactagctcaagtagctcttcgtcgtcaaccatgtcacatttgttcatgaatacgatgatgtaaggtacaccaacctgacgagaaagtaggatgtgctcacgagtttgtggcataggaccgtcagtcgcagcaactactaggattgcgccgtccatttgagcagcaccagtgatcatgtttttaacataatcggcgtgtcctggacagtctacgtgtgcgtagtgacgagttggagtatcgtactcaacgtgtgaagttgagattgtgataccacgctcacgctcttctggagcgttatcgattgatgcgaagtctttagctacaccaccgtatacttttgcaagtacgttagtgattgctgctgttagagttgttttaccgtggtcaacgtggccgattgtaccaacgtttacgtgcggttttacgcgttcaaacttttcttttgccatcttaaaaaattcctataaagaaattaacgcctgacccactattgggccagacaagctaaatcatataacagcgcgagctgcaattattgcatctgcaacgttcttagcggcttctgcatacttcaaaaactccatagagtaagatgcacggccttgtgttgcagatcgcagatcagttgcataaccaaacatttcagaaagtgggacttgcgcattaatttgcttaagaccaccgaatgcttcttccatgccttcgatcatgccgcggcgacgatttaagtcaccaactacatcacccatgttttcttcaggagtgataacttcaaccttcattactggttctagaagagctgggtttgcttcaagcgcacctttcttcatcgccattgaacctgcaatcttaaatgccatctcattcgagtctacatcatggaatgaaccatcaaatagagtcgctttaacgccaagtaatgggtagcctgccagcacaccttgagccatttgctcttggatgcctttatctaccgcagggatgtattctttaggaaccgcaccaccaacaacttcgttaacgaactcgtaaattggcgcatcattttccgaaatatccatcggttcaagtttaagccagacgtgaccatattgaccacgaccacctgattgacgtacgaacttcccttcaacttcaacagctgaacggatagcttcacggtatgctacctgcggcttaccaacgttacattcaacactgaattcacgtttcatacggtcgacaatgatatcaaggtgaagttcacccataccagaaataatagtctggcctgattcttcgtcagtttgtactctgaaagacggatcttctgccgctagtttacctaacgcgatacccatcttatcttggtcagcgattgtgcgaggctcaaccgcaacagagataactggttctgggaactccatacgctcaagcgtaatgattgagttcggatcacacagtgtttcacctgttgttacgtctttaagaccaatagccgctgcgatgtcgcctgcgtagactactttgatctcttcacgtgagtttgaatgcatctgaacgatacgaccaagtcgctcacgcttacttttaactgggttgtataccgcgtcaccctgtttaacagtaccagagtaaacacggaagaaggtcaaggtgccaacgaacgggtctgtcgcaatcttaaaagcaagtgcggcaaacggtgcgttgtcatcagcaggacgttcatcctcggtaccatcttctaagataccttggatttgtttcacttgtgttggcgcaggcatatattcaataacggcatcaagcacagcttgaacacctttatttttaaatgcactaccacacgtcattggaacaatttcgtttgctaatgtacgctgacgtaaagctgctttaatttcagcttcagtcagttcttcaccttctagatatttatccattagttcttctgaggcttcagcagcgctctcaactaagtgagaacgccattcttctgcaagctcaagaagttctgccggaattgcctcataagagaaagtcatgccttgatcttcggcattccagttaatggctttcatcttaataaggtcaataacacctttaaagtcgtcttcagcaccaattggtagctgaattggaacaggcgttgctccaagacgagatttcacctggctaaccactgttaagaagtcagcgccagtgcgatccattttatttacgaagatcatgcgaggaacttcgtatttgttcgcttgacgccaaactgtctcagtttgcggctgtacaccagatgaagcacaaagaacaactaccgcaccatctagtacgcgtaaagaacgctctacttcgatagtgaaatctacgtgtcctggagtatcaatgatattgatacgatggtcgtcaaattgagcgtccatccctttccagaaacacgttgttgcagcagaagtgattgtgataccacgctcttgttcctgctccatccaatccatagttgcagcaccatcatgtacttcaccgatcttatgagaaagacctgtgtagaacagaacacgttctgttgttgtggttttacctgcatctacgtgagcgcaaataccgatattacgatagcgctcaagtggagttgtacgtgccatatgatcctcttaaaggttaaggacagattaccaacggtaatgagcgaatgctttattcgcttcagccatacggtgaacgtcttcacgtttcttaaccgcagtgcctttgttgtcagcagcgtcaacgatttcttgagctaaacgtaagcccatagatttttcgccacgcttacgtgcagcgtctactaaccaacgcatacctaatgcgttgcgacgtactggacgtacttcaactggtacttggtacgttgaaccaccaacacggcgagatttaacctctacctgtgggcgaacgttttcaagtgcagcttcaaagatttctaggtgcgacttgcctgatttctcagcagccacgtctaacgcaccataaacgattttttcagcagtagatttcttgccgtctaacattactacgttaacgaatttagcaagaagttccgatccgaacttaggatctggaagaattttacgttgacctattacgcgtcttctaggcattttgtatctccggtatcttcaggtttgctcttttagagtcaatacccaaaacaattaatttaaaaatttagtgcttggccttactaacggagaaccattagcccttagggcgtttagcaccgtatttagagcgagcttgacgacggtcgctaacgcctgcacagtcaagtgcaccacgtacagtgtggaaacgcacacctggtaagtctttaacacgaccaccacggataaggattacactgtgctcttgtaggttgtggccttcaccaccgatgtaagatgttacttcgaaaccgtttgttaaacgaacacgcgctactttacgtaatgcagagtttggtttcttaggtgtagttgtatatacacgagtacatacaccacgcttttgcggacacgctttaagcgcagctgagttacttttagtaaccttgctacgacgtggcttacgcactagctggttaatagttgccatttaaatagctcctgaaattaaaattactactgaaaaaataaaaaaatccgccctgtttacatgctcgttactaaacgtgcaggcaaatgggtggcggaattttaatgagcaaagtttaacctgtcaaccttaactcatcgtaaggcagcagataactgccttacgatttcttaatccattgattaagttgagattattggtttccagagatatctgcgttaagtgcatcagttagtgcttgagttgcctcttcagcgcttactgtttgctcttcaacgatttcaccttgcttgcgacggttcaaacggtcttggtgatacgcaaagcctgtaccagctgggatcagacgacccacgattacgttctctttaagaccacgaagctcatcgctcttaccatttacagctgcttcagttaggacacgtgttgtctcctggaatgacgctgctgagatgaaagattcggttgcaagtgacgctttagtgatacccattaattggatttcaaatttagctgggatcttgccttgcttttcaagctcacggttcgcgatatttacgcgtgccacttcaacttgttcaccggctaagaactcagtgtcaccgccgtcaaggatgatacatttacgtagcatctgacgaataattgtctcaatgtgcttgtcattgatcttaacgccttgcaagcggtaaacctcttgcacttcgttaacgatgtagttagctacatgagttacaccacgtaggcgtaagatgtcatgtggtgattctggaccatcggcgataacctcacctttagacacttgctcaccttcgaacacgttaagttgacgccatttagggatcatctcttcgtatgcgtcaccctcagctggagtgattacaagacgcttcttacctttagtttctttaccgaagctaatagtacctgtgatttctgcaaggattgcaggatctttcggtttacgtgcttcgaataagtcagctacgcgaggtagaccacccgtgatgtcacgagttttcgaaccttcttgcggaatacgtgcaagtacgtcacctgggtttgcagttgcaccgtctgttacttcaatcgttgtgaatgaaggtagacgtgtttcttgcagaccacgctcatcgctttcgatgattagtttaggttctttcgcattcgctttacctaagtctttaacaaccacacgtgttaaaccagttaactcgtctgtttgtgcttcggtattcgagtcatcaatgtcgctgaacgagatttttgacttgtgctcgagaacgattgggtgactatgcggatcccaagttgcaacgatatcgttaccttgaacttctgcattatcttgtacagttaacaccgcaccgtaaggaactttataacgctctttctcacgaccaaagctatcaatgatagtgatctctgttgaacgagacgtgataacaatcttaccgtctgtgtttaatacgtacttcgcattgtgtaacttcaatgtaccgttagttttaacttgtacactgttttcagcagacgctcgagatgccgcaccaccgatgtggaaggtacgcatcgtaagctgtgtacccggctcaccgattgattgtgccgcgataacacctactgactcacctgggttgatgatgtggccacgcgcaaggtcacgaccgtaacacttagcacatacaccaaagtcattatcacaagtgattactgaacgaacgcgtacttcatccactgagtgctcttctaaaaggtcacacagtttttcgtcaagcatgatgttacgctcaacaagtacttcgtttgtaccagggattaatacatcttcagcaacaacacgaccaagaacacgttcgcgaagtgcttctacaacgtcaccaccttcgataagcggtttcattgttaagccatcttctgtgccacaatcgtcttcgttgattactaagtcttgtgcaacgtctactagacgacgcgttaagtaacccgagtttgctgttttaagtgctgtatcggcaagacctttacgcgcaccgtgcgtcgagatgaagtactgtagtacgtttagaccttcacggaagttcgccgtgattggtgtctcgatgattgaaccatctggacgtgccattagaccacgcatacccgctaactgacggatctgagcggcgctaccacgtgcacctgagtctgccatcataaacactgagttgaatgaagattgctcttcttcttcgcctttcgcgttgattacagtgtcttttgataagttcgccatcatctcacgtgataagttttcatttacacgtgaccagatatcgataactttattgtacttttcaccagccgttacaagacctgattggaattgttggttgatttcagttacttcagcttccgctgattcaatgatttctgctttaaccggtgggataactaagtcatcgataccgattgaaacacctgacttcattgcgtagtggaaaccagtgtacattacttggtcagcaaagataacagtatctttaagacctagacgacggtaacactcgtttaataagccagaaatttgtttcttacctagggcttggttgattaactcaaacggcatgcctttaggtaggattagtgaaagaatcgcacgacctactgttgtttcaacaatagatacttgctcaactgcatcaccatcttcagagctaatagtctcgctgatacgtacttttacgcgtgcatgtaactcagcgttaccgctgcggtatgctttttcagcttctttaggatctttaaatacagtaccttcgcctttcgcattgatgcgatcacgcgtcatgtagtaaagacctaatacaacgtcctgtgaaggaacgatgattggctcaccattcgctggagataggatgttgtttgtagacatcattagagcacgtgcttctaactgtgcttcaagcgttaacggtacgtgtaccgccatttggtcaccatcgaagtcagcgttgtacgccgcacaaactaatgggtgtaaatggatcgctttaccttcgataagcacaggctcgaacgcttggatacccaaacggtgaagtgttggtgcacggttaagtaatactggatgttcacgaattacttcgtctaatacatcccatacttctgccacttcacgctcaaccatcttcttagcagctttgatagtcgtagccatgccgcgacgctctagtttgccatagataaatggtttgaatagctcaagtgccatcttcttaggaagaccacactggtgtagtttaagcgtaggacctactgtgattacagaacggccagagtaatctacacgtttaccaagtaagttctgacggaaacgaccttgcttacctttgatcatatcagcaagcgatttaagaggacgtttgttagaacctgtgatcgcacgaccgcgacgaccgttatcaagtagcgcatctaccgcttcttgtaacatacgtttttcgttgcgtacgataatgtctggtgctgctagatctaatagacgcttaagacggttattacggttaataacacgacggtaaaggtcattcagatcagaagtcgcaaaacgaccaccgtctagtggtactaatggacgtagatcaggtggaagtactggaagtacagtcatgatcatccactcagggttgttacctgattggtggaaagattccattaatttaagacgtttagtgatcttcttacgcttagtttcagagttaattgttggtaactcttcacgcatttcagcaattaattggccaagatcaagttcacgaagcaagtctaatactgcttcagcacccatcttcgcttcaaactcatcaccgtgctcttcaagtgcatctaggtactcttcttcacctaaaagctgaccacgctcaagcgttgtcataccaggctcagttactacgaatgattcgaagtaaagtacgcgctcaatgtcacgaagtgtcatgtctagcattaagccgatacgtgacggtaatgattttaagaaccaaatgtgcgcaactgggctagcaagctcaatatgacccatacggtcacgacgcactttagtcagcgttacttcaacgccacacttttcacaaataacaccacggtgcttaaggcgcttatatttaccacataaacactcataatctttcactgggccgaagatacgggcacagaataagccgtcgcgctcaggcttgaaagtacggtagttgattgtctcaggtttctttacttcaccgtatgaccatgaacgaaccatatctggcgaagcaagaccaatgcgaattgcatcgaattcttcggtcttattttgttgcttcagaaacttaagtaagtctttcaccttagctctcctgtcggaggttaatcttgagggcgaaccaatcgcccctacattctattcggcctaacaggtgcggcttaagccgcacctaaatggcttaattttcttccaactcgatgttgatacccagtgagcggatttctttcaacaatacgttgaacgattctggcatacctggttccatcttatggttaccatctacgatgttcttatacatcttagtacgaccgttcacgtcatccgatttcactgttagcatttcttgtagagtatatgcagcaccgtatgcttctagtgcccacacctccatctcaccgaaacgctggccaccgaactgagctttaccacccagcggctgctgagtaacaaggctataagaaccagttgaacgtgcgtgcatcttgtcatcaaccaagtggttaagtttcagcatgtacatgtaaccaacagttacttgacgttcaaactgatcgccagtacggccatcataaagtgtaacttgaccgcttcttggataaccaccaagctctagtaagtctttgatctcgctttcacgagcaccatcaaaggctggagttgcgatcggtaaaccacctttcaagttttcagctaagcgacgaacttcatcatcagagaacgagtcgatatcaactttctgacgacaatcacctaattcgtaaactttcttaacgaagctacggatttcgtgcagttcacgctgctctttcatcatttcttctaagcgctcacccacaccacgtgcagcaagacccatatgtgtttctaggatctgaccgatgttcatacgtgatggtacacctagcgggttcagaacgatgtctaccgtacgacctttgtcatcgtatggcatatcttctactggtacgatagtcgagataacacctttgttaccgtgacgacccgccatcttatcacccggttggatacgacgtttaacagctaggtatactttaacaatcttaagtacgcctggtgctaagtcatcaccttgagtgatcttacgacgtttgttttcaaacttcttatcgtattcagctttaagctcatcgtactgagcagctagttgctcaagttcagcttgcttgtcttcttcagcaaggctttgcgtaagcagcttttcagcatttagtgatgcaattgaatctgcgctcagacctgcgtcaataagtaacttacgagcacggtctaatacaccagcttctaagatacggaactcttcgttgaagtctttcttcgcttcgcgaagctgcatgtcttcaacttctaacgcacgcttatctttttcaacaccgtcacgggtgaaaacttgtacgtcgattacagtaccagttacagagtttggtacacgtaaagagctgtctttaacgtctgacgctttctcaccgaagatagcacgtagtagcttttcttcaggtgttaattgcgtttcgcctttcggagtcactttacctactaggatatcgccgcctttaacttcagcaccgatataaacaacgcctgattcatcaagcttgcctagtgcagattcacccacgttagggatatctgctgtgatctcttctggacctaatttagtatcacgtgcgatacattgtagttcttgaatgtggatagtcgttagacgatcttcttgaactacgcgctcagatagtaggattgaatcctcgaagttataaccgttccatggcatgaatgccacgcgaaggttttgaccaagtgctaagtcacctaagtcagtcgaaggaccatctgctaatacgtcaccacgtgttaccggctcaccaaccatacaagttggcttttggttaatacatgtattttggtttgagcgtgtgtacttagtaaggttgtaaatatcgatgcccgcttcaccaggaatacgctcatcttcatgtacatttacaacgatgcggcttgcatccgcatacattacttcaccaccacgcttagcaacgatagttacaccagagtcttttgctagtgtaagctcaatacctgtacctaccagcggcttgtccgcgataagtgttggtactgcttgacgttgcatgtttgaacccatcaatgcacggttagcatcatcgtgttctaggaacgggataagtgctgccgctacagagatcacctgttgtggtgatacgtccatatattgctgatccattttgcccataaaggttgattcacctttgtgacgacatggaattagttcatcaacaaactcattgttttcgttcaagtttgagttcgcctgagcgataacaaactgaccttcttcaatggctgataagtaatctacttcatcagtaactacaccatttaccactttacggtaaggtgtttctaagaaaccatagtcatttgtacgtgcgtacgtagacaatgagttaattagaccgatgtttggaccctcaggcgtttcgattggacatacacgaccatagtgagttacgtgaacgtctcgaacttcgaagccagcgcgttcacgtgttaaaccacccgggcctaatgcagaaatacgacgcttgtgcgttacttctgaaagcgggttattttggtccatgaactgtgataactgagatgaaccgaagaactctttaaccgctgccgagattggcttagcgttaattagatcttgtggcattacagcgtcaaggtcacctaagcttaaacgctcacgtacagcacgctcaacacgtactagaccaacgcggaattggttctcagccatttcgccaacactacggatacgacggttgcctaagtggtcgatatcatcaacatcgccaacaccgttacgaatagcgataagcactttcataacagctacgatgtcttctttcgataatgtgccagggcctgtatcagtgtcataacctacacggctattgaacttcatacgaccaactgttgataaatcgtaacgctcttcagagaagaacaagttatcaaataaggcttcagccgcgtctttcgtcggtggctcgcctgggcgcatcatgcgataaatttctactaatgcttctaaacggttgcttgttgtgtcgatacgtaatgtatctgacatgtaggcgccgctgtccacttcgttgatatatagtgtatcaatcttagtgtgacctgctttaaccaattcagccattagctcaagtgatagctcgtcattcgcatttgcgatgatctcacccgttgactcgtcaacgtagtttctagctacaacacgaccaatgatgtactcatgaggtacttctaattggttaataccttttttctcgatgttcttgatgtgacgcgcagtaatacgacgacccgcttcaacaaggacttcaccgtcatcgctcttgatatcaaaagcggcagtttcaccacgtaaacgtgaaggtacaagttccataagaactttaccgtcagtaacttcaaacgcagtagtatcaaagaagatatctaggatttcttctgtagaaaactctagtgcacgtaagatgatagacgccggtaatttacgacgacggtcaatacgtacatataggttatcttttgcatcaaactcgaagtctaaccatgaaccacggtaaggaattacacgcgcgttataaagtactttacctgacgagtgagttttaccgcggtcgttatcaaagaatacaccagggctacggtgtagctgagaaacgataacacgctctgtaccattgattacaaaggtaccggtatcagtcatgagcggaatttcgcccatgtaaacttcttgctctttaatgtctttaactgtgcctggtgcttctttgtccatcaccacaagacgcaattttacgcgaagtggagcagaataagtcacaccgcgaatttgacattcttttacatcgaatactggctcaccaatacgataacttacgtattgaagctcagaatttcccgagtagcttttgatcggaaacacagaacggaaagcagcttccaaaccgtgatcgccatcagcgtcagggactaagaattttttaaacgattctaactgcgtcgacagtaagaaaggtatatccaaaacttgtggacgtttaccaaaatccttacggatacgtttcttttcagaataagagtaagccatggggttcctcagcttgctgatctttgacccgacctgttcttgtaagaacagacttaactggcatctatgccaagatgtacaacattaaattgttgttctattttgctctgccactttcaacaccaaaagaggtaacaacttgaaagtaaagagaaaattagattttatttgcgctacaggattgtgtcgctctatagcgcaaaaaggccggtgattaaataatcaccagcccttgcctgatttctcaggcagcgaacctagcgtaagctagattacttgatctcaacttcagcaccagcttcttcaagatctttcttaagtgcttcagcttcttctttagatacaccttctttgataggtgcaggagctgattcaacaagtgctttagcttctttaaggccaagaccagttgcaccacgtacagctttgatagctgcaaccttgttagcgccagcgccagcaaggattacgtcgaactcagtcttctcttcagcagcttcagcagctggaccagcaacaacagcagcagctgcagttacgccgaatttttcttccattgcttcaactagagcaacaacgtccattactgacatttcagcaatagcatcaaggatttggtctttagttacagacattacaaatttcctaattattacggactaattttagtccaaaaaaaatattacaccgaaagtgaacaaaaaaacagcttaaaattaagcagcttgctcttctttctgtacacgtactgcttcaattgttttacacaatttacctgcagacgcttctttcatagcgctcattaagcgtgcaacagcttcgtcgtaagtaggtagagttgctagcatagctgcgtctactacgttaccttcaaatgcagccgtcttaacttcgaatttctcgttcttcttcgcgaaatctgagaagatacgcgcagcagcaccagggtgctctgaagagaaagcgattaagcttggaccaacaaatgagtcagaaaggcactcaaaatctgtaccttcaacagcacgtttagctagagtgttacgaacaactttcatccatacaccagcttcacgagcttctttacgaagggcagtgatagcaccaactgttacaccacgagaatctgcaacaactgcagaaagagcaccagtggctgcttcgttgacttcagcaacaattgcttttttgccttgaagatttaaagccatgggtgttactcctggtttaatgggtcgccgatattggcttccctgttctactcttccccatcaatgatggagatgctttttacggcgagagccagaagattaggaaaaatctatctggggattcacaccgtctacgtaggtaaaatgattaaggtctagggccgcctacggtcttggacggaagcccaatttatcgtttttacccgaaggcattacgaaattatggacttcaacccgaattctttacttgttttgaaattaactttctcaacaaaatggcgcaaaattatagttcaaatttcacgccatgtaaactcttaattaagcaacagtcgtgcttagtgagttttggtcaacagcaacacctgcgcccattgttgtagagatagttactttcttcacgtaagtaccttttgcttgagaaggtttagccttcttaagcgcaacaataagagcttcaaggttttgttgaagttgctcagcagtgaaatcaaccttaccgatagtagtatggatgataccgttcttgtcgttacggtaacgaacttgacctgctttcgcgtttttaactgcttctgcaacgttaggcgttacagtaccagttttagggtttggcattagaccacgtggacctaagatttgacctagttgaccaacaacacgcatagcgtctggagatgcaacaacaacgtcaaagttcatctcgcctttcttaactagatcagcaagatcttccatgcccactaattcagcaccagcttctttcgcagcgtctgcgttagcgccttgtgtgaatacagcaacacgaacttcacgaccagtaccgttaggtagtacagtagcaccacgaacgttttggtcagatttacgagcatcgataccaaggttaacagcaacgtcaacactttctacgaatttagctgtcgctaactcttttaaaagagcaactgcttcattgatttcgtaatctttagtcgcatccactttttcgcggattgtacgcatacgtttagttaattttgccattatcttagtcctctacgttcaagcccatcgcacgcgcagaacctgcgatagtgcgaaccgcagcgtccatatcagccgctgtaaggtcaggtcgttttgtctcaacgatttcttcaagttgagcacgtgtaactgtacccactttttcagtgttaggacggcctgagcctgatttgatgcctgcagctttcttaagtaagtaagcagccggtggagttttcatttcgaacgtgaaagaacggtcaccgtaaacagagatcactacaggaactggagcgcctttttcgatagactctgtacgtgcgttgaacgctttacagaattccatgatgtttacaccgtgttgacctagtgctggacctactggaggactagggttagccataccagcggcaacttgtagcttgataatagcttcaacttttttagccataataaatacctcatttggtgggtcatagccttgtgcgcgcgaggacgcgtactctaacggcttcccagtttaaaaattggttctcactttttgtgataaaaacaagtcgcaacttgccctaacacaaaaaggccgctgattataagttaatcagcggcctttttcaagcttattgccaaaatattaaacgattttggcagctttaattttttacttacttgtcttgttcaacttgaccaaactcaagctcaacaggtgtcgaacgaccgaagataagcacagacacttttacgcggctcttttcgtaatccacttcttcaacaacaccgctgaagtctgcaaacggaccatcgataacacgaacaacttcacctggctcaaataatgtagccggcttaggtgcttctgagttttcttgaagacggtttaagatgcggtcagcttctttttggctaattggcgcaggacgatcagacgtaccaccaatgaagcccataacacgtgctgtgctatttactaagtgccagcttgcatcgttcatgtccatttgaactagtacgtaacctgggaagaatttacgctcagatttgcgcttttgacctgcacgcatctcaacaacttcttcagttggtactaatacttcaccaaaactatcttccaaaccttcgatcttgatatgctcaagaatggtttgtgctacacgcttctcataaccagagaaagcttgtactacgtaccaacgtagtttcttttcgttcttctcatccgacatgggattagatctccaatccagttaaaaagcctactgcgcggaataaaatgccatctaatccccaaaggataagtgccataatcacagttgcaaccattacaattaatgtcgtatgtgttgtttcttggcgtgttggccacacaactttacgtacttcgatacgtgcttcttttgcaaatgcaataaaagtacgacctttttcagttagtgaggcaatgcctaaacccgctgcaacagcaaccactacaccaatagcacgtaataatacagattggtctgcatacatgtggttaccaacgactgcgcctgctagtagcgcaatagctacaatccactttactgaatccatcgcattcgatggagtttctacattcgtgctcataatatttttaccttaactacagacacaacaaccctgcgcactggcagggttaatccattaaaatctaaacttaaaaacagacttgtttaaaccgatttttaatttcagacttcacacattgtgtaaaagtggcaggggcggagagattcgaactcccaaccgtcggttttggagaccgctgttctaccaattggaactacgcccctgcaaagtggatgcctattatacttacgcaattcattaacacaagtgtaaaagatacccataagttaaattctcacctgctgaattaaaaatcaatattaacattgattaaaaagcagtttatcatcaacccgatataggaacaattacaataaatggacgttcaatttgactgctcaacatagcctattatttcgttttttttgctctattgcgctactgatttgttactcagtcagcgctcgttctctgcatttaagtagcttcgatagtcaacaagggctaagccaaaactccatcaattgtagtatcaacgatgcacaagggttcacgtggtttgcaacccaaggtggtttgaatcgatttgatggttacgaatttaagcgttttaaagcaacgggcttaaaaggaagtatttcaggtaattgggtcaccgcatgtctacaagatgaaaataatcagctttggtttgctactgcaagtaaaggattaaaccgcttagatacaacaacagggcaattcagcacatatacttcgtccagctcactgctgccgcttagcgatgataaaatctggtcaatggcgtttgataagttcgacaacctgtggcttggccatgaacaaggtaaattaacgatgtttaatttacctaaacagcaggttgaacatttccaaatcaagctctcaggtaatccaaatattgttattcgcgatatagttacaagcaataaccagttgtggcttgccaccagccatggcttaataaagttcaatagtgttacaaaacagtttgagcagcatgccactatcacctcggcactatggcacatcaaccttttagcaaaccagcaacttttggtaggcgctaaacacggcttatacctgctcgagccaaaaaacgacacgaccaatgagattgcacgatttaatggtgtctggatcactgatagtttaattgatagcagtaataatctttggatcacaagttatggaaaaggcatttattttcttgaagcagacaaaaatattcatcaggatatagtgcaatatcgacatgacgcacaactgacaaactcgttgaaaagtgattatttattgtcagtttatcaagatcctcaaggcgttatatggattggtagtgatggctttggggtgcagcgctacaatccttctcaacagcaattttctcatcaaacaaaaactctcaacgctgattctcttagccacaactttattcgcgctattatcaaacgcagcaatggccagttgtgggtaggtactcgcaacgggcttaatctacgaactgaaaatggctataaaaactataagtctcaactccctaatagtaatatttttgctctgcacgaagataataaacagcaattatgggtaggaacctatggtggcgggttacttaaataccaacaagacagcgatgactttgcggtcttctcgatgcaaagtcatcagttaagcagtaatcgtgtctacgcaattgcgagtgacggtaacgatatactttggcttggcagcaaccaaggtcttacccgctttgacccgagcacaggaagtgtccgccacttccaacatgaccctactcgtaacagcctagctaacaacactgtttttacactcgcttatgatcatgatgacaatgcgctttggataggcacgcgtgctggactcaacaagttagatatagacacagagcactttacactccttaatgatcgttcttcttcagtagaacaaaatgcgctcagccataatatggtcacctctttattactggataataaaaacactatttgggttggcactatgcaagggctaaataaagtcgacaaacagacctttgccgttaagcacataacagagcaacatggtctggcaaatgacaatatttttgatattttagctgataaacagggttacctttggcttgctacaaatggtggcttatcccgctatcaaccgcataccagcaaaatacagcaatttttacccgaacaaggtattcagcatcaatcttttatcctcggcgcgagctttcaagctgctgatggcgaactctattttggtggcatcaatggctttaaccacttttatcctgagcagttatatttaactcatacgccacctaccccagttttaactgagttgctgctcaacaaccaagcgattgagacgcgttactttgatcagcaatctgatttgcttataaatgccactaacacgctttctctgccgcaatcatctggagtcatcgggtttaagtttagcgctctacaaaatccagcaagcccaaaccattatcaatatggctataaattagcaggttttgatgagcagtttctctatacagacgcaagtcttcgccaagtcaattacccacaactccctgctgggcaatatgaactactaattaaagcaaaagatcagtatgggcaatggagtcaaaccaagtctttattagcactgaccgttgtgccgccttggtggcaaagccccattgcatacgtggtttattttcttgccgtattgagcgtggcttggtcactattaaatgcaatttacaaacgcaaactagctgagcaagacaaacaaaaagaagtggcgttaaacaaattaaaagatcagttcttagataacattagtcatgagctaaaaacgcccctgagtttaatccttgcccctgtcagtcagttgcaacagcaacatcaggacacgcaatcacaaacacaccttgcgagtattaaacgcaacagccaacggttacttgaactgattaatcaattactgcaattaagcaaacgaccaagtactgctgtgtacactgtttctccatattcattagcacgttttttaaccgagcttacgcaagacttcgccccgctatttgcgcaaaaaaacttacagtttagttttcaagataatgatcatttattatgtgtgactaatattgcacctaatcacgcccattctatttttagtaacttaatcaataacgccttaaagtacactcctgaaggtggcagtgtcagcgtaagcctaacggttaatcagcaacaagccataataaatataaccgacacaggaataggtattgctgttgaggatcagcatcaggtttttaagcgcttcacacgtgttgcgtcaatcgaatcaggcagtggtatcggcctaacattagtaaaacaacttgtggaagcatatggaggagaaataacacttcacagcgagataggtaaaggtagctgctttagtgtttcattgccggttgttatgaacaccaaccagagcaaaacgaccttagaacatcgcagtgctaaacaaacccttctcattgttgaagacaattatgatatgacacagctactgctcagcttatttaatcaagaatttaactgtctttgtgctgctgatggccaacacgcgatttccctttgccaagatgaattaccagatctcattattagtgatgtgatgatgccagttatggatggttatcagctactggctaaactacgtgaaaatcctgccaccagccatgtcccagtgttacttttatctgcaaaagcagatacgcaaagccgcttaaaagggcttgacttgttagctgatgactttttgagtaagcctttcgaaccgactcttttgatcagccgcgttaaaagtctgataagtttacgccagctattaaatcaacacttaactgcacaactagccgcccccatagcaacgagtcccacagagaccatggtagtgcaaaacaaagactactgctttactgaaaaactcaagcaagtggtattaacccactatcaagatgaaggattctcagttgaacagctcgccgcagcaatgtgtatgagtactcgcgctttacagctgaagatgaaatcactctactccctcactccttcagattatttacgtaatacacgcattgaactagcagcaaagcagcttattaatagctcatactcaataggtcaagttgcccaaaataacggttttagttcacaaagctacttcgcaagaagcttcaaagtgcaatatgggatctcaccaaagcaataccgagaaaaatatacaaaacaagcagattttcgcgtcagtgaataaagttttcgtctgagtactattaacaagccactgatttacctactttatatccataaaaattcaaacagctcacacattgttgttagccagttttctgcatgagatatcagttaaggaaaatcatatgctcacaaaaacacacaaggcgatctcgctaacgttatttgcagcagcactgagtgcatgtcaaagcacgtcgacatcaacaagtaataaaaatagtccaaatgtaaatgaagtcgcacagcaacaatataacggcccaaaagctcgcatcgctgtagcccgctttaccgataaatcaaatgattcgcgttggtggcgaaaagaaatcggtgaaggtatggcagatcaattaacaaccgcattagtcagtaccaatcgatttattgttttagaaagacaagcactcgatgcggtgttatctgagcaagatctcgctgtttcagggcgcgtaagtgcagcatcaggagcagcttatggtgaaatcgaaggtgccgaaatcgtggtagttgcagcggttactgagttcgatgatgatagttcaggtgccagtgtaggcagcggtggttttattggtgatgtatttagttcagtatcggctggtttctcaggctcacacatggccattgatttacgcctaattgatacccgcacctcgcgaattctagccgcaaccagcgttgaaggtggcagtaaagacttcgatttcacatcagcagcgactaactttggcggtgcacttgtcggtggaaatttaagtggctggtcaaacacgccaaaagaaaaagcattgcgcgaagtaatcgtaaaagccgttgaattcttagagtcaaaagtgcccacaacttattatcgttataatagcgacaacaccatagcagctggctacaaggcccctgcaccactaaaagtaaccactgctgcagcaccggctaaagcgccaatagcatcggttactgttccgagtcacagaatgccttactatgaaaaaacagacctggcgatgtcacgactcaatttagtgtgtttaggttacttgaagcagcaaccacactatgaagaatttgacgttgaagacgtaaagtatgatcaagccactgtgattgcgctcactgaatatcagcaagaaaataagctaaaagtgacgggacttgcagatgaagcaaccaaaaaatcccttgatgatacacagtgtattgccaaaacgaacaaatcaagtttagaaagcttaggtagcatgtttaaatttgactgagtaaacttacagccagtgttagcactggctgtatcaccgtttttattggcgccttcactacactaacctgctacatatcacactacttgtaacaactcaccacgataaaaatcacataacaaccaaatttgttgaaatggatgctgcttaggcacatcaaggtgagtaagtactgacttaaaatcatcgaaatgccatatagtactggcatttcgaattaataaccaaggctgcgaagactcgtaatgtttcttagctttttgtgccagcaatcgatgcaaagcacagtgcaaacgctcgttactgggcgctaaagccatttcagcgagatcgcgctgcattgagatagacagcgggcgacctagcaccgccatcgcttctgtttcactggcatataaatgcgctatttcaatatcgagccgttcatcacctttataacaactcacatctggtttacttggtgtgttatgccagatattacgcatggttacaccaaactgcttttcgtagcagcgtaagaatagctttgccgcactatgctcgagtgctattttttcttgttcactctcacgattcatttaatgtcgcatatacatcacttaataacccagaagcgccgaaacgaaatagctctggctgtaagtacgcttcacccatgattgattcggctaaggctaaatactcagcagcatcagtgactgttctgactcccccagcagccttaaaaccaacctttttaccagtcgctttaatggtatttaacatgatggctgttgcagctagcgttgcattaacagccactttaccggtactggttttaacgaagtcagcaccgccattaattgccagcttagttgccgttgcaataagatcatcgcttaattcgccactttcgataatgactttaagttgcgcttggctgccacatgcctcttttgacgctttgacatactctaaaactttgcgctcatcaccggcaatcagtgctttataggggatcactaaatcaatttcgtcggctccgcgctcaatggcaaacagtgtttcatttatcacttgttctaaaggctgctccccatcaggaaagtttgtaactgtcgccacttttacgtgctgaagttcacgctcagcgagtgcctgtttagcgtcactaacaaactggctgtacacacaaaccgccgcagggatgcccaattttggctcaatgctagcaaccaagttattaattgattctgtggtgtcggtgtcattcagagttgttaagtccatcagcgccaccgcttgagcagcgattgtttgtgttttattcattacgtttacttttttgttgctatcttagtgacctatagtagcaaatttttatcattcggctataaatcataactaatcaccataaggcaactaatttacttgtaactcgccgcaatcccttgttaactaagccttaagccaaacacaaccaccatatataacttttagctatataaacttggttttaattattttttactttatatggagcactatattctgcttacctgcaataagcagtttattcaatgtgttttaggggtgtagacaaagtgcaatatttaccaatctttaccaaattagacgacaagcctgttctggtagtcggcggtggggatgttgcgttacgcaagtgccgagcatttttaaaagcccgcgccaacgtgaccttagtcgcccctgcattttgtgatgaactacaagagcttgcaaagcaaggtgatgtaacactcattaacgacttttttaaagagcagtatttagagcaacagatgctagtgattgctgctactgatatcgacagcgtaaatgaggaggtgtttaagcttgccaatgcacgcaatatcttcgtaaacgtggtagatgaccaacctaagtgcagctttatttttccatcaattgttgaccgtgacccgatcacaattgcaatttcaagtgccggtacagcgccagttttagcacgtcgtttacgtgaaaaactcgaaacgcttattccacagcatattgggccattagcaagtttagtgggcagcttccgtgacaaagtaaaacaacgctttaaacactttgccgatcgtcgccagttttgggaaggcgtatttgattcatcagtcgtgagcaaagttcaagcgggaaataccgaagctgccacagcgcagctagagcagatgttagatgccaagcctgagcctgaaggcgaagtgtatgttgttggtgcaggcccgggcgaccctgagctattaacgctaaaagcactacaattaatgcaacaagccgacgtggttgtatatgactacttggtttctgatgaaattatggatttagtgcgccgtgatgccgatttggtttgcgtgggtaaacgtttaggcgatcacagtgttgcacaagaagatactaatcagatgctggtcgattttgccaagcaaggcaaaaaagtatgccgtattaaaggtggcgatccatttatttatggccgtggtggtgaagaggtgcaagttctcgcagctaatcaagtacgttaccaaatcgtaccgggtattactgctgctgcaggttgtagtgcttatgctggcattccacttactcacagagatcatgcccaagccattcagtttgtaacgggtcactgtaaaaaagatggtcaagaattagattggcagtcacttgccaaaccaaatcagaccttagcgatttatatgggggtgattaaatcaccacatattcaagcacaattattaaaacatggccgcggtgcagacacacccgttgccattatcgaaaacggcacacgtaaagaacaacgtgtggttacagggcaattaggtgagctggccgatttgatttcgcgccatagcattatttcacccgccttattaattattggcgaagttgcatcattgcatcatcaacttgcatggtttggtcaaaccgagcaaaccagcagctttgcccagcctttaactggcgtagcttaatttaacttttaatcattttagtaggacgactaacaatggctttaacacaccttcagcaattagaagctgaaagtatcaaaatcatgcgcgaagttgctgctgagtttgaaaacccggtgatgctttattctatcggtaaagattcatcagtgttattacacttagcgcgtaaagcgttttacccagcaaaaattccatttccacttttacacgttgataccaactggaagtttaaggaaatgattgagtttcgtgaccgccttgctaaagagtatggttttgatttaatcgtccataaaaacccagaaggtttagcgattgatatcaatccatttgtgcatggctcagctaaacacaccgacatcatgaaaacgcaaggcttaaagcaagcgttagacaaatacggctttgatgctgcgtttggtggtgcacgtcgtgacgaagagaaatcacgtgctaaagagcgtgtttactcattccgtgacaaacaccacagatgggatccaaaaaaccaacgtccagagctttggaatacgtataacagccaagttaatccgggcgaaagtattcgtgtattcccgctttcaaactggactgagcttgatatttggcagtacatctaccaagaaaacattgaaatggttccactttatcttgccaaagaacgccctgtagttgagcgtaatggcacgcttattatggttgatgacgaacgtatgcctttagaagaaggtgaagtaccgcaaatgaaatcggtccgcttccgcactcttggttgttacccgctaacgggtgctgtggaatcaacagcaggaaccttaactgaaattattgaagagatgctgctttctacctcttctgagcgtgaaggccgcgtgattgatcacgactctgctggttcaatggaaaagaaaaaacgtgagggctatttctaatgtctaaaacaaacgacacgattaatgaagtaagagagctaggcatcgacgcctaccttgcgcgtcaacaagacaaaagccttttacgcatgctgacttgtggtagtgtagatgacggtaaatcaaccctgattggccgccttttacacgacagccaccaaatttatgaagaccaacttgcagccctgcataaagacaatgaaaaagtcggtaatgccggtgaagagcttgatttagcactccttgtagatggtcttcaagctgagcgtgagcaaggtattaccattgacgttgcttatcgttacttctctacagcaaaacgtaaattcattattgctgatacgccaggacatgagcaatacacacgcaacatggtgaccggcgcatcaactagtgacgtggcgattatcctagttgacgctcgttacggcgtacaagtacaaactaagcgtcatagctttatctgtgactcattaggtattaagcagtttgttgttgctatcaataagatggatatcgtcgatttcgatgaaacggtatacgagaaaatcaaagccgactaccttaagtttgcagagcagctaaacgttactaatatcaaatttgtgccgatgtcagcactgaaaggtgacaacgtagtaacacgctcagagcacacaccttattacacagaaaagccactgctggagttacttgaagactcaccagcagctgaaattgataacgggtttgaagcccgcttaccagtgcaatatgtagtacgcccgaacttagacttccgtggtttccaaggcactttaacgtctggcaaacttagcgtgggtgatgcagtaaaagtattaccatcgggtaaaagctcgagcattaaagagattgtcactttcgatggtaacctagataccgctgaagcaggccaagcaattaccttaacgttaaacgacgaaattgatatcagtcgtggcgatgtgattgtaccagcagcctcaaatgctgctgtaacaaaccgtattcaagctaaattagtatggatgcatgaagcaccgttagtattaggtaaaagctacaactttaagttaggcagcaaaaatacctcggcagtggtaagaaagatcgatcacacgattgatgttaataccctagagcatggtcaagctgactcattacagcttaacgaaattgccattgtaaccctagagcttacagaaacaattttggctgatgagtaccataacaaccatgaaacaggtgcatttatcctaattgatcgcttatctaacctgaccgttgctgcaggtatgattgaacaattacttagcaccgaagagcaacaaagtaactttagcgattttgaagttgaatttaacgcattagtacgcaagcacttccctcattggcaagcgcttgatataactaagcttaaataatcaccattcgcctgttataggaagtaaaaagcatgtatcaacagctggtattaacaggcattatgctggtattagtcgggtgtctttttggcactcgactaaaacctgcatggttatttgtcggcgccattggtattagttatttagctgggctgatcagccttgaagatatgctaattaactatgcaaatccttctttaattactcttattctacttgtactcgtttcgatagcggtagaaaaaaccacgttagtgcaaaagcttgctcagtctctttcgaaaggtagcctgacaagttcggtgacaaaactgggtttatcaactgcctttttatcatcatttactaataatacagcagtagtagcatcgcttatcagtgcaataaaagaaagcccgacacattcaccgtctaagcttttgttgcctttatcgtacactgccattttaggtggcacgatcaccctgataggtacctcaaccaatttaattgttaatggctttgccgttgaagcgggcatggagccacttggtttttttgattttaccttgattggtttaggcgcattaagtgttggacttatcactattttagtgatgctcaagtatttaccagataacggtaaaaatgaccaagaggtggtgcccttttaccttgaaggtaaagtcgaaacaggatctaaactaattggtaaaagtgttgaggaaaatggccttcgtgaattaaaagacttgttcttagccgaaataatccgcggtgataaacgtatttgcgcggttaccccaaaacaagttattaaagaaggtgacgtactgctgtttgtaggtgatataaagtcagtacctctgctcacccaatttgacggcttaaaagttgtgcacgacaaacatgagaaagacgttgagcacctagttgaagttgttgttagtcattcatcaaaatacattggtaaaacaattaaagaaattcgctttcgtgaacaatttcatgcagccgttattgccattcgccgcggccatgaccgtttacaaggtggcttaggtaaagttcaactgcaagcgggtgattccttgatccttgctcctggcaaagcattttactcgctgcccaatttaaaacgcgagtttgtttatatatcaggccttgatttacaaacccatttaaaacctaagcaatcaaatattgtgttagcaagttttgcaaccgtattagggttaagtattgttggcctagtgccattagtaaaaggcctactcgttcttcttatcggtttaatgctaacgggcacaatcaagctaagtgaagtaaaacgtcgcttcccaatagagttactcgcagtagtcggtagtgccattggccttgccaaactcatgataggcacaggccttgccggtgaaatttcgtcggccatgttatacgtattaggtgactttgggccttacggcgcatttatcgccatattcttaatgacggttttatttaccgaactcattaccaacaatgccgctgcagcgctttcgtttccggtagcgtatgcactcgccgttggttttgatgtatcaccgttgccttttattatggctgtcgcatttggtgcatcagcgagcttcatttcgccatttggttatcaaactaacttgatggtttacagcgcgggaaattaccgccttaaagattacattgccatgggcttacctttatcgattatttactcgattgcggttttaacactcataccactggtattcccatttcaataacgagagtaaagacaatggatgaaaatattgtttggcataattacgccattagcaaatcacagcgtagtgagcaaaaaaagcataagcctgccattttatggttcacaggtttttcaggttcaggcaaaagtacagttgctaacgcactagaaagcgcattaaaccagttaggcgttcacacctacctacttgatggcgacaatgtgcgtcatggcttatgtaaagatcttggctttactgatgaagaccgcgtggaaaacattcgtcgcgtaggtgaaactgccaagctaatggtcgatgccggtcttgtggtattaaccgcatttatttcgccattccaaagcgaacgcgatatggtaagaaacttagtagaggatggtgagtttattgaggtatttttagataccccgctcgacgtgtgtgaaacacgcgaccctaaagggctttataaaaaagcgcgtgcaggtgaaattaagcacttcacaggtatcgactcagactatcaaatccctacatcgccagaaattaaaatcgataccagtaaaaacagcctagaccaatcggtgcaagaactggtagcgtatttaaaacaacagcaaattataggttaagtcatgaatcaaacggaactgctagaagaaatcttactcctcgcacgccaagccggcagtgcaataatggggatttacgaaaaggactttaatgttgagtacaaagctgatgaaagcccagtgaccgacgccgacctagcagctcacaaagtgattgtgaatggcttacaacatctcacccctgatgtaccaattctaagcgaagaaagcgctgatattagctgggatatccgtcaaacttggcaacgctactggttagtagacccaattgatggcaccaaagagttcattaaaaagaatggcgagttcactgtaaacattgccttgattgaaaaaggtaaaccggtattggccgttgtcgatgcaccggcattaggtgtgtcgtatattgctgcagaagcaataggtgcctttaaagataaaggtgatgagcgtatcgaacttaaggtaacccgtaaaccaaataaagggcttatccgtgttgtcggcagtcgttcacacccctctcctgatttagctgaattcgtaaaacagtttgaagatgtagaaatggtttcaaaaggcagctcactaaaactttgccttgttgccgaagggagtgcagatatatacccacgccttggcccaacctgtgagtgggataccggagcaggtcatgcgattgctgaaatagcaggcgcaacggttagcaaactcgatggcagcccactactgtataacagtaaagaagagtatctgaatccgtattttgtcgtatcggctttacaggactaaaaacgttccgtttaatatcgtaggctgggttgagcgtagcgaaacccagcacctttcttatcatctcaaagtaagtctatagatttaacgcctaccacttaatagtgaaacccacctagataataagtccttgttcctataatattttgctctcttaatctattaaaggaataaccatgacgactgttgaaaaagcaattgaagccggttacgaggcacaaattactgcactttataaagccctttcacaaggggtgcttgctgctaatggcgatgaaagtgaaatcacagcagctgaagcgcgttttaagaaaggtttagcatttgccgcagacattaaagctcgcgcacttgcagctgcagaataaatagcttaattgggcttatctcaataagcccaactttttcctttgtaagtctctccttacagcatagttatttaaatacaacgctaaaacatgcattcttagtcgcttttctatatgctgcgcgacaattattattctaatagtggagtgctaatgaacacacatcaagatgctatgcagtatgatgcatcgacaacaagtagtaactcaaaatggaatcttcatgacacccagtgggtgttaagtttatttggcaccgcagtcggtgcagggattttattcttaccaattaatatcggcatcggcggattttggcctttaattatcatggcatgccttgcctttccgatgacttacttagctcacagaggcttagcccgctttgttttatcatcaaaaaagcctgaagcagactttaccgatgtagtagaagaacactttggcattaatgcaggacgcctgatttctttactgtattttctatctatcttccctatcttacttatttatggtgttggcttaaccaatactgtagacagctttatcgttaatcaattaggtatggagtcacccccacgcgtgctgttatctggcctgctcgttggcggtatgatcagcctaatgttaggtggcgaagcactcatgttacgtgcctttgctattcttgtttatcctctcgtcgctatcctgttcttcttatcgatttacttgatcccaagctggcaaatgcctgatgtatcaatccctgagttttcaggtttcatgaaaacactttggctatcaatacctatcattgtattctcgtttagccatgccgctgcaatatcaagctttgtacatgtacagcgcgctcactatggcgacaatgccaaaatgaagtcagaagcaattctgaagcgcaccagcttattgttaattgtatttgttttattatttgttttttcatgcgtgctgtcgctttctagtgagcaaatggtacaagcaaaagcagataacgtatctatcttgtcattccttgccaatattactgataactcgtttattgcgaccttagggccattagttgcctttatcgcgattacctcatcgttcttaggtcactttttaggtgcccgtgaaagcttcaacggcttagtcagtaaacaagcgcatatgaaccctaagcttgttgataagattggcactgtcatcatgttcttcgctatttggtattgctcagtgatcaacccaagtattttagacatgatggatcagctatcaggccctatcatcgccatgatccttttcatcatgccaatgattgccgtatataaggtgcctagcttacacaaatacagaaaccgcttgagcacactgttcgtattaacagttggctctctagccgtatttgcgcttatctatagcatgattaaatagtcaaagcttaaactttaaaaagcccagcagggaagcctgctgggcttttttgttagtaactggaaagttggaaggcgtggcgtaggttgggtagagcgcagcgaaacccaacacagagctatcagctatcagctttcagccgtcagcgatcagccgctcggtgtgggtgtttggtgctgcgtcaccctcagccggaggttataggctaagtgtacttgtaggaatggctttaaccatgaatgtttttgttatagtttgaattcggcactgaagtgcctcctacgaggctttgttactgagggagactcagttacctgacaactcggtagatcaactgacatctattatctgccgtctgagatacgcatcacgtaggaatggcttctgccatgaatatgcttgttatggtctgaattcggcactgaagtgcctcctacgggggttgttgctgtgggtgactctctactaaacaacccaacaattcaactttacccttgctaactagaaactcgctaactcgttgggtttcgctccgctctacccaacctacctggagaatgaacagggagtgctgagggagtccctgtactaaacaaccccgcagttcagctgatgtctgatggctgaaagctgacagctccagacgcaaaaaagcccgactctttcgaatcgggctttctctaatttggagcctggcgatgtcctactttcacatggcaaatgccacactatcatcggcgctgtttcgtttcactactgagttcggcatggggtcaggtgggtccaaaacgctattgtcaccaagcaaatttgggttgttaatcgcttttgcaattaactaaaatctggaattctgatattaagtaaatgtctactttagtgtcttaacttctgtctgttacgctgtcataaaacgcgtttggcgttgtatggttaagcctcacgggtaattagtacaggttagcttaatggctcgcaccacttccacaccctgcctatcaacgttgtagtcttcaacggcccttcagagactttaaaagtctagtgagaactcatctcgaggcctgcttcgcgcttagatgctttcagcgcttatcagttccgaacgtagctaccgggcagtgccattggcatgacaacccgaacaccagcggttcgttcactccggtcctctcgtactaggagcaacccctctcaattctcaaacgcccacggcagatagggaccgaactgtctcacgacgttctaaacccagctcgcgtaccactttaaatggcgaacagccatacccttgggaccgacttcagccccaggatgtgatgagccgacatcgaggtgccaaacaccgccgtcgatatgaactcttgggcggtatcagcctgttatccccggagtaccttttatccgttgagcgatggcccttccattcagaaccaccggatcactatgacctactttcgtacctgctcgacgtgtctgtctcgcagttaagctggcttctaccattacactaaccgtacgatgtccgaccgtacttagccaaccttcgtgctcctccgttactctttgggaggagaccgccccagtcaaactacccaccaggcactgtccgtaaccccgattaggggccaacgttagaacatcaacactacaagggtggtatttcaaggacggctccacaaagactagcgtctctgcttcaaagcctcccacctatcctacacatgtagggtcaatgttcagtgccaagctgtagtaaaggttcacggggtctttccgtctagccgcgggtacacagcatcttcactgcgatttcaatttcactgagtctcgggtggagacagcgtggccatggttacaccattcgtgcaggtcggaacttacccgacaaggaatttcgctaccttaggaccgttatagttacggccgccgtttaccggggcttcgatcaagagcttcgtccgaaaactaaccccatcaattaaccttccggcaccgggcaggtgtcacaccgtatacgtcatcttgcgattttgcacagtgctgtgtttttaataaacagtcccagccacctggtcactgcggctcccgtccgcttagagagcaagtctcatcacagataggagcgtaccttctcccgaagttacggtacgattttgcctagttccttcacccgagttctctcaagcgccttagtattctctacctgaccacctgtgtcggtttggggtacgattcggtataatctgaagcttagaggcttttcctggaagtatggcatcaacaacttcaccaccttagtggctcgtctcgtgtctcagtcttagcaacccggattttcctaagtcaccaacctactcactttcacatggacaaccaacgccatgcttgtttagcctgctccgtccccccatcgcaattataccaagtacgggaatattaacccgtttcccatcgactacgcctttcggcctcgccttaggggtcgacttaccctaccctgattaacatgggataggaacccttggtcttccggcgtgcgggtttttcacccgcattatcgttactcatgtcagcattcgcacttctgatacctccagcaaccctcccgggtcaccttcaacggcttacagaacgctcccctaccactcaaacatagtttgaatccgcagcttcggtgcatagtttagccccgttacatcttccgcgcagaccgactcgaccagtgagctattacgctttctttaaagggtggctgcttctaagccaacctcctggctgtctgggcctttccacatcgtttcccacttaactatgactttgggaccttagctggcggtctgggttgtttccctcttcacgacggacgttagcacccgccgtgtgtctcccggatagtactttacggtattcggagtttgcaaagggttggtaagtcgggatgaccccctagccttaacagtgctctacccccgtaagtattcgtccgaggctctacctaaatagatttcggggagaaccagctatctcccggtttgattagcctttcactcctagccacaggtcatcccctaacttttcaacgttagtgggttcggtcctccagttgatgttactcaaccttcaacctgcccatggctagatcaccgggtttcgggtctataccttgcaactatacgcccagttaagactcggtttccctacggctaccctaatcggttaacctcgctacaaaatataagtcgctgacccattatacaaaaggtacgcagtcacccaacaagtgggctcctactgcttgtacgtacacggtttcaggttctatttcactcccctcacaggggttcttttcgcctttccctcacggtactggttcactatcggtcagttgggagtatttagccttagatgatggtccacctatattcagtcaaagtttcacgtgctccgacctactcgatttcacttaagatgcattttcgtgtacgggactatcaccctgtatcgtcaaactttccagaatgttccactaacacataataagcttaagggctggtccggtttcgctcgccgctacttccggaatctcggttgatttctgttcctacgggtacttagatgtttcagttctccgcgttcgcctcttacacctatgtattcagtgcaagatacctgcaagcaggtgggtttccccattcggaaatcctagtctcaagcgctttttactagcttgactaggcttatcgcaagttaatacgtccttcatcgcctccaactgccaaggcatccaccgtgtacgcttagtcacttaaccatacaacccaaacgggtctttgttagtgacagctgttaacttcgccagaagttaattcatcaaataatgatgagaatactaaagtagataccgattaatcattgctgattaactggcatatttttacttttgaaaactctttatagatacaagtatctataagaattttaatatcagctttccaaatttttaaagagcaagagaataaacttctcaaaattaaacacactctattctcaagcagtttattacctgattaagaatgtttatttttaaggagtaaaagtggtggagctaagcaggatcgaactgctgacctcctgcgtgcaaggcaggcgctctcccagctgagctatagccccacatatgctggtacttattgcttaattttccacttcagaagaagtggtgggtctgagtagatttgaactaccgacctcacccttatcaggggtgcgctctaaccaactgagctacagacccaaacaataagtgttgttctctttacaattaacaatcatctgtgtggacactacgaacaaataagttctaaatcgtataaggaggtgatccagccccaggttcccctagggctaccttgttacgacttcaccccagtcatgaatcactccgtggtgaacgtcctcccgaaggttagactatccacttctggagcaacccactcccatggtgtgacgggcggtgtgtacaaggcccgggaacgtattcaccgcatcattctgatatgcgattactagcgattccgacttcatggagtcgagttgcagactccaatccggactacgacgcactttaagtgattcgcttaccctcgcaggttcgcagcactctgtatgcgccattgtagcacgtgtgtagccctacacgtaagggccatgatgacttgacgtcgtccccaccttcctccggtttatcaccggcagtctccttagagttcccgaccgaatcgctggcaactaaggataggggttgcgctcgttgcgggacttaacccaacatctcacaacacgagctgacgacagccatgcagcacctgtatcagagttcccgaaggcaccaaaccatctctggtaagttctctgtatgtcaagtgtaggtaaggttcttcgcgttgcatcgaattaaaccacatgctccaccgcttgtgcgggcccccgtcaattcatttgagttttaaccttgcggccgtactccccaggcggtctacttaatgcgttagctttgaaaaacaactccgaagagtcgagcttctagtagacatcgtttacggcgtggactaccagggtatctaatcctgtttgctccccacgctttcgtacatgagcgtcagtgttgacccaggtggctgccttcgccatcggtattccttcagatctctacgcatttcaccgctacacctgaaattctaccaccctctatcacactctagtttgccagttcgaaatgcagttcccaggttgagcccggggctttcacatctcgcttaacaaaccgcctgcgtacgctttacgcccagtaattccgattaacgctcgcaccctccgtattaccgcggctgctggcacggagttagccggtgcttcttctgtaagtaacgtcacagctaagtgctattaacacttaacctttcctccttactgaaagtgctttacaacccgaaggccttcttcacacacgcggcatggctgcatcaggcttgcgcccattgtgcaatattccccactgctgcctcccgtaggagtctgggccgtgtctcagtcccagtgtggctgatcatcctctcaaaccagctagggatcgtcgccttggtgagccattacctcaccaactagctaatcccacttgggctaatcttatggcgtgaggcccgaaggtcccccactttggtccgtagacatcatgcggtattagcagtcgtttccaactgttgtcccccaccataaggcatattcccaagcattactcacccgtccgccgctcgtcagcaaagtagcaagctactctctgttaccgctcgacttgcatgtgttaggcctgccgccagcgttcaatctgagccatgatcaaactcttcaattaaaagttttttgaaaccgaagtttcgtgctcaatgaattctgtataaattgactatatagtcactcataagaaattgagactctaaatctgtttgcgtcatctagcgaactagaatctgctgttagaactcaatctgtacgagtgcccacacagatgattgctttatattgttaaagaacgttgcgacgttgtcgctagggatgcgtataatacatccttaatttttcgagtcaacacttaatttcaaactttctttcgataatttgaaaccgaagtttcacttaactctctgctacgttgttcagcgcctttcgttgctgtccgccgtgtcagtggggtcgcattatagggagatctaaaaacagatcaacacttttttttgatctttttactgttcgctcaaaaagcgaactaaatttaccgaaaatagcaaaacaggttgcgattatggctgttttttaagccaatattcataatttaatgcaaatttcattgctatgttcatttaactcgttaagatagcaagttcacaatgttaaattaatgtttatttcttgtttattggtagatcaaaatgaaattacccgatcaaaaatcttttcttttctccgttattcttgctgtattagggtttgttgttgttaagtttgtatttgcgagcttagcgttagacccagcattgctatttggtgcaggcttattaattggtgctttagttatcgcagctctttcatcaacgtcaagtgaggaggccgaagtaaaaacaaaaacactttatgttggcaacctaccttatcgtgcaaatgaaagtgttgttcgtgctttatttgaagaacaaggcaaagtgttcaacgtacgtttattaaaagataaaaatacaggtaaacgccgtggctttggttttgttgaaatggctgaagtggatgcagataatgcaattaatcaattaaatgatagtgagttccagcaacgtactttaaaagtacgtgaagcaaaacaaaaacaagagaacgaggctaatggtttccgcgagggatctgatcagtcagcgtaatgagttctacacttaattgcgaatgacaaataggagccgttgcataatagtgcagcggcttttttttacctgttgtaaaggtaaggccacgtaaagagattaaactctcaacccgcttagcaatcgctttgcctgaatcaataagtataatccgttgtttgtagtaattactaatcgcgctggcaagtaatggaaagtgcgtacagccaagtaccaacacatctatctcttctgctatcgctaaatcactcaatacttttgcaagctttgcttcattaagtatctgcgtatgaaatagtgcttctgcaatttccaccagcgtcgttgaaccatataagctgactcgagtgccttggctatgagtactaattaagtttgcagtatagcggctcttggttgttgatggtgttgccaataacccgatatgtttacttttacttatagcgcacgcaggcttgatcgctggcactacaccaacaacttctatattggtataaggtcgaattgcctctaaggctgatgttgaagcggtgttacaggctattactagtatatctacctgcagcgctctactttctataaagcaaagtaaagcaagtaagcggtcaataatggtttgttggctttgagaaccataaggtaataatgcattatccatgaaatagctataatcagcatttgggatcaatgcttggatctgttcaagtacagtggttccacctatacctgaatcaaacaccataatatggactgacaaactgcttacctcggatcatcaaaggccagcagtttgccatgcagttttagaaaaagaaagttgcggttatgagtcttgctcagaagctgaacgcaacttgttcatttgctcgaacattgatttggtataatcaactaacttactgacttcctctttgtcttgattcaaccattgtaagataccagctagttcattttgcaaacctatgtcgccggctttattaaatgcctgttttaggtcgtcattaaacggcgctattttctcggcgacttctttttcaggagctggtttatattcttcatagccttttatcgcagccactgttttggtttgtttcagatccatcgtaaagccaacgagttgttcattacctaagttcaactctttcgcttgttcaaaggcttcttctaatgaaccagagaagaatgtctcactgacactttgcaagtcttccatcaattcattgatagcttgttgctcttgctcatttaaatcaccattgactgtcatcgaaaatgacaagtcgcgtgattgcgaagattcactaacaaacgcttcgttatcgccatttttactatagctacttgccgatttactttcataggcatctgcaaagctaatacttacttcatcaccttcagccgttgtaaaagtgtattctgcgttattacttaaactaaggtattgggcttggcttactgaaactgcgttaggtttagggttgaataaatcatcttctagctcatctatacctttatagatgccttctttagatttttcgatgccttcttttatatcatcattaagaatgcctgactctttgagctcatcatacgcatcgtcgatacccatttgcacacctttgcgtgcatcacctagcatgcctttgagtttttcatcatcagcaccatcggcttttgctttgcgaagtgcgccgccaacaaagtcgagtacgtttttaacgatctcttcaaaatcaaatagcggtttatcttttttctcttcagctttaggtaagccaagagctgcagctagtttatcatcaagaacttttgctgccagctctcgcccgcgttgctgataactgtcttgacgattttgaatggcaggctgctgcagtgcctgtttgccattgtatttattcacatttgtattaggtatatagcctagattgccaattttcatgatccgactccatgttatggttatctcattatcggccaaaaaccacataacttaagttttttgtataaaaaaacgacaccaaaataaataacaaaactagacaaatcctcagcgctccctacaatagcgccgttataaagctaagagataaaaggtaatcagccatggcggttataaaaattgatacaactcaatacgatgcacaattgagtgagaaagagcagcgcatcactaaccagtttcgacgttttggagttgaaaaattagaggtgtttggctctgatcctattcattaccgccaacgtgcagagtttcgtgtatggcatgagggtgaagacttatttcacatcatgtttgatcagcaaaccaaagagaaaattcgtgttgatgagtttgaccctgcagcacctttagtcggtgaagtgatgcaagccatgatcgaaaacttaaagggcagcgaaattctgcgccgtaagttatttcaaattgattacctttctagcctaagtggtgaaatcctcgttagcttgttatatcacaaacaattagatgagcagtggttacaagcaattaaagagctgaaaacaaaattaagcgcacagtttaaaattgattttattggccgtgcgcgtaagcaaaaagaagtgattggtaacgattacgtcattgagcgtcttaatgtaaacggtaaagaattaatttatcaacaagtcgaaaatagctttacgcaaccgaatgcgaaagtgaatatcaagatgctagagtgggcacaagcactatgccagccacttagcaatgacttactagagctatactgcgggaatggtaatttctcaattgcccttgcgggttcattcgaccgtgtattagccacagagatttcaaaatcatcggtttactcagcgcaatacaatatcgcgcagaataaagttgagaacttagatatcattcgtatgtcgagtgaagagtttactcaagcgatgaaaggcgagcgtactttctctcgtttagatggcattgacctgacaagctataactgccaaacaatcttagtagatccaccacgcgcaggcatggacacgctaacgtgtgacttagttgctaactacgacaatattatttatatctcgtgtaatccagacacccttgagcgtgaccttgatcacctatgtaaaacccatgaagtaaaacgttttgcgatcttcgatcaattcccttatacccaccacatcgaatcaggtgtgtttttgcaacgcaaataaaatcatttctctgccagcgcagcaaatagcgctggcaactgctgctcgctgtagactgctatattattgtcggttaacagctttgcagttaatcccatccctgaaattttctttccagaatgactaccatcgtaaatagtattgcgaccgcatgaaggacttgattcttttaataacgcataacgaatgccctgcttttgacaaagcttaagtgcttgttctgcgccgtaagcaaattgtacagttacatcctgcgaatctttggtaagtactcttcctgcttttatttctgcaggcggtcttggcgtgggcagcccaccagctacttcaggacagaatgcgatgagccttccctgctgtttgagtgtttctaagcctggatgaagtaaattttgcgattgcccatcataacgaacagggtttcctaataaacaacttgaaactaataatttttgcatgtgctgtaccaacaaaaaagctccgcgaacggagcttttattttaattaagctaagcttacttatctgctaggtaattaattaaaccagccatgcttttagcatcgctaatacctgagtctgcacctaaaattaaacgatatttaccattaacgataaaggttggaacaccttttaaagcacctttttgttgatagtactcttgatcacgtgccattttagacgccatcgtgcgtacagaaaaactgttgtagtacttatcaaagtcttctgctgttacaccttgtgaaacgaagatgtctttcatatcagctaattcattaatgcgtgcacgcttggtatgaatatggttaaagatagcagctataatcgcctctttttgtggaaggacggcagcagcagacatagattgcgctaagatagtttgaatttctgggtcacgaggaccaacaaaattcactgaacttttcttaaaagtgatttttttatctaataacggctttagttcttttacaaccggttcaaagttattacacgcggggcaataaaatgaaaagaactcttttacttctggctttttagaagcgcgtgcatcaattgtttcataatgcttcccttcttcgtattgcgctgccgttgcattagccgctaaacctagcgtcatagccataaatgcagcctttactaacttgatcattacttcatcactccaacattattgttttaataaaaatgcgactaactcatcaagcatctgttggctcttgatggtatttaaattaattttatatttatcattaacgataaaagtaggtacacctgttaatgcgcccatctctgagtactgctgttgcttgtcacgcattgccttctctgcgctgatcactggcatactcgcaatatcagtatcaaacacgtcacttgtaataccgttagtggccagtaatgctttaacatcttttaggtcttgaagcagtacacgttgcttgtggatgctattaaaaatttggtcagcaacttgttcacctttaccatgctgtttagcaattaggtaagcataacttaggttactttgtgtttgctttgaaacaccacctaaaaagttaacatggctttttacaaactctgtgccttctggcaatttagacgcaagcgcttttgcaactggctcaaattgaaaacaatgtggacaatagaatgagaaaaactctgtaacttgcggcgctttacttttttcaacgtttaatacttcgtattgatttcccgcttcaaaattcgctgctaatgctgcgaatggtaaacataaaataagtagacttaactttaattttttaaacattgttttctcgtctctaattaaatttaaaatttatggtaataattttaacggcgcttcttgtaacgctgcaagttgttcttttagggctaatatttgctgttcccagtatttgtcttcagcaaaccaagaaaagttccgaggaaatgccggatcatcccatctttttgcaagccagcccatataatgaaccatgcgcatcgctctgagtggctcaattaactttaattggctgtgatcaaagtcacaaaattcttcataagcagccactaaggtgtctaactgtaacagttgattgttacgatcgccactgagcatcatccataagtcttgaattgcaggaccttgacgactgtcatctaaatcaacaaacatcaatgcatcacccgaccacaatatatttccagcatgacagtcgccgtgcaggcggatagtttcaacatttttatactgctcagtggtttctttgataactaaatctaaaatagtataaaaagggttttcaagtgacatgggcaccaagttacttgcttgtaactgaactttagctgtctgtaggtattcttcgcaactgatcaccggacgatgtttaaaaggagcggcttttgctacttggtgcattcgtccgattaaacggccaagcacatcgagttgatctaaattatcaacttcaaaaattcgaccaccaacacttggaaacaaagcaaataaataaccattatgttcaaataagctttgcccatcttttagcacaggtgcaacaacaggcacctctgcatcggccaactcaaaggcaaatgcatgctcttctaaaatttgctctttactccaacgctcaggtcggtagaacttaacgacataacgatgaccatcttctgctttaaattgataaacacgattttcgtagctatttaaagccaataaacctgattcagcataaatacctatactctcgactgcatctaaaattgaatcaggcgtcaggtcaacaaaactaaatttactcataatgtctcatcatataaaaaaagcgggaaaaccccgctttttattcatctgctcagtgtactgaattattgtcctttaaagaagttactcgactgcgaaatctgcacatctggctgaccatcaacagaaagtataaattcgaacttagtcatcggtttcttcaaatcatagggatcaacaaccagtgacaaaggtacgttatacgattcgccagatgaaacggtaaaactttgcttacctatgtattcaaagttatctaacccttcaacactaatattaaacgtctggtcgtactgagctttattgatcacttttagtgtgtaggtgttttcgaccaagccgttaaagtcaactcggtataactgattacggtcgcgaataatgtcaaaatccattggttttcgcatcgcaatattagtgatcaaagcaccggttaagattactaaaataacgagataaccaattaatttaggacgcaacgcatgagttttattatctggcgtttctaaattgcgctctgtagtgtacgaaataagcccgcgtggataattcattttatccattactccatcacatgcatctatacacgcaccacagttaatgcactcatattgtaaaccattacgaatatcgataccggttgggcacacctgcacacacaagttacagtcaatacaatcacctaagccaagctcttttggatcttgtttacgtgaacgtgggccacggctttcaccgcgcgcttcatcataacttaccgtgaaggtatctttatcgaacatcgctgattgaaagcgtgaataaggacaaatatgtaaacacataatttcacgcatccaacccgcgttaccataagtacataccgcaaataccgctaaacaaatatacgaatacgctgttgcatcaagcgtaaacagatcaggtagtagctggcgaataggtgtgaagtaaccgacaaaggtaaaggcggtataaagtgaaaataaccaccagctggtgtgcttcgcagttttacgccaaaatttatcaaagtccataggacgctgatcaagctttttacgttggttggcactaccttcaaacttttcttcaaaccaaataaaaataaaagtccaaacagtttgtggacaggtataaccacaccagacacgtccataaaaagtagtcactaagaataatgcaaacgctgccagcattaaaatgaaagcaaggatagtcaaatcttgcggccaaagcgtcaacccaaaaatattaaatttctgacctactaaatcaaacaatacagcttgttggccgtgaaaattaatccaaggaagaagcataaacgcaagcatgcctacaaagccaattcgctgccttagtaattgatgtaaacctgttacagctcttacataaattcggttacgtggattaaacctatcatcaagggaagcattttccggtttttggatttttacttccgttgggatatttttaactttaatttgtttatccatcaaaattcctcaacgccactaggaaatatgtttttcatttataggcttgcaaaatcaactaagcaaatcagaatacatctcattacattcaaagatttctgaaacttctaacctatcgttgctattatactcaatctataaaaaatttcaggttttgatctcacctattatttttaactatttaatcttatctgcttgcttttaaaacaaccattttattaaacttgtcactaaacctcctttacttagatcaaagatgattgtgttatgaaaaaatttcttattttagtgcttattgttttagcattgttcacgattgaccaccctttgatcaaagagcctagagagcgcttattaggcgatggcataagcttgctttctgatgctagtaaagtaaatcgaagcccagcggctaatctagctaaaagtaatattaagacccaacttaatttatcaaactctgagctagagtatgttgaagacacatttacaaccgatgaaaagctgcaagtattccatttgcattactgccgagaaaaagatattaatttatacttttacggcgagcgcctaaaccgcgtatgtagtattgtcgcaaatgcattggaagaaaggttaaacaagtagtggatttttcagcgcttaataaaagaacgagtgactcatttgcaaagcaacgcaatatgctaaaaaagctgagcaaaggacaaaccttgtactgtgaaacttgtaaaggtgccctcaccttagatttaaaaacagatcaaccaggtaaaggcgttgtgcgctgtgcaaaaggttgcacagatattctattagagctgggttaattccagccctcatcattataaagctgactatttaccgcagccacctctattagttcagcaaaaccagtggcaaactcattcattacttcatattgctgctggcaaagctgtccttcagataaaccattttcggttgcaatagcggcgatttcagtactttcaatgataaaaaaacctaagctctgtaaggcggttgttaatgcttctttgagctcatcggctaagtgcggcgctcccaatagcttattcaggtagccttgtgctccgtttatgaagccttggctccaatgctggcattcttgaatatctaaatagtcctgtccttgtgagctaaattgcaagctcacaggtaatgaaaagccggtttcaaatacttgttcactaattttttgatacaaggccataaaagcaaacaatacttgctcatccatttgcccatcacagcctggcgcaatttcttctaaccactgatgaacatcaagcggctctggtgcgcaaattactgcaaacaaatagccttgggtttgcgctaatgaaagagcattttgttgctgtgccaaaaattgactcagtaaatcactttgctgctttgaaaactcaggtaattgcatattgttctattagtccagtttaaaagttaagcggatatcgaccttcattatctgcacgtccaagaaactttgcagcatcatgcacttcttttggtaagcttgcctctggtttaatataacctgcaactttaaaatctaaattcgcttttaatgttgcatcggcttcaagccctaaacgattatcaggatcaaccagtactgcaatatcacctgatttacaacttaagcgaccacttaacggaccaatactgaaccagccattcatcccttgcacatcaatattaggactggcaatttcacctgctaagctgtcacagtaaggctgaccagaactgtattcatctaggtcaacaatcacacgtccttgagcattaatgggtaatggcagctttaggcgctccattgcacgctcaacagttaaacgtaaggtggtatttttaacggtgactgactgattaaatagcccatatgaaaagtctgcgcggccagaaatatcagccttatcacgtgggtctccaaagcgaacagtacctactaacttacctgtaaatagtgaccagcccgataattgccaacgaacattatttaattgttcaccatcaaaacgcacttgcattacacggccgtcccacagtgagccactggctttacccaactgcaattgttttggtaaatgaggtgccgctaaatcgagtgcaacactggcgggtgttttaataagcgtaaacaccaaaaaacacatcacaaacacagtgattaataaaataatttttttcatcgcttacttctctagtaccaaacgacttacacgcacaaagcccggcttgtcatctttacttaaatctaaattttcgatgagaaccccttgcgaattgaccagctcatcaagccactcaacaagtttattaaattcaacagaatcaattgttaagcgtaatgaattatcatttggttgcattttgctaatcgtgatctgataacggttacgagtactgttgacaatttgacttaaattgcggttattggtgactcgcgcgctaccactggctttaagcttgacgatactgtcatctacccaagcaagtagttcttgctgcttaatattgtcttgttcagctttttctattgctgtattgagaggcctgaacacacccattaccagcacaaaaatcacaaacacaacgccagcaaccatgacaagttgctgctcttgttcttttaatgaacgccaataattaattaattggtctttcatgcagcacctcgcaacttaatttcaccaacgacataatcgccatcattattcaaggaaccttgatcaaccgttaaaccacgttgttctaagatagctttcaccttgccaaatgattggaaatctttgcctcgcgcacgaatacgtaattcattgcggccatgatcataacggagtgtctctggggtaaaatctttcacttctgcaaagattgcaaccagatcattagttaagtctaagaaacctgcactgtttccgccctcaataagtgccagctcgttacgaatttggcttcgaattaattgcggacgtacctttttattgggaaaagcacgttgataatttgagacgacttctgctttggttgcttctagttggctgttaagtttataaagttcgagagacttaacacctacactacacactaaagcgatgccagcagcaatcgccgcttttttccaatagccccaccaaatagcagattttttctttagctggtaaataccttgacgtaagttaaaacttacttcaggtaattgctttgcaaacaaggctaaaggcaaatcatactgctctgttttggctgtcagtgtgaccgtgtctggaaagtcagttgccgggctaaaatgagcaacactaggattacctatagcggttaaataaccgtgcaaccaactcttttctacagctgctatatgccaatcaccaagcttacataaccactgaccatttaactctacagcgcgaagctgagtatgatcctcaacgcgtggcaacaataatgcgtcaggaagtactttaaatacttcaatagcgtgctcactaaattgagctaaccattgctcaaaccactctcggtcagtcatcgcaatattaattgcatgcttttcttcgatagttgttggctcagcgattgcgataaataaatcgtcgacatcgcaagctatttcttcttctagcatgtaaggaagtgcttgctctagcttacgactccacttagttggcagtgctactgtttttaattgcacttggtcgcttggcaatagaacaacgacctcacgtgattgtgctttttctgttagttcaccaagatgtgccgcgttggcaatatcgccactagcaattatttcttcttctgttggtgagtaaataagccagttaaggctgtctgttaatgtatgacccgtacggatcaacaatatttctgtcactgtacgcctccaaattttcgcgccagtatcgttactttaccattattggcatggagtaaggtggtcatcgaaaaacgcagctctgcaaattcagcctgcgtttgtagtttaaagtattcactgttgatggtgaacaggccttcaactgctttcacattctgtgcgccctgttgatttacctcttcaaaaaatgcttctaaatcatcaaagcctttttcagggcgtgatgataaaacggtttctgcgccagaaagactaagcccctcaatgagtgagcttaaaataatcgcactttctgtcggtagcgtatttacattaatagccatgagttcactacctgggatcacacacacaaatggtagtattttttccatcactagtgggttaaaaccttttattaaacgcagttcagatggagaagcgaaataactgttagctgtcatataaggataatctcgcgataagtattcgtcttcttcggcacctgagcgataggtaatgctatcagcatctagccaatcataaacgctatcagccatggcttcttctgactcatcagagggtaaatcctctatattctctaatagtgctaagagcgctttatgtgctggatttgttttgttattaggatctttttctaggtcaggttcagcatgcaatgcattcaaatttaggcacgcctgtaaatctgtgattgtcccagttaacatgccatgatcaactggataaggaacccctccttgttgtgcccacgcttgccctaaatgtgttttatctggatcatcttctttagcttgttttagcgctttaattgctaattcttcagcggcaaacgcataccactttgcttgctgatgattttgaatattgctgctgcgctgtacctgcaccattaaattagcactcatttcgacagctaacatagcagcaagcgctacaataaataacacaatcacgagtgcagcaccttgagagcgtttaaaactaatcatggctgactattcgctccttgtgttgaggtcgtaactttaccttcacctggcactaaaaatacgcgacgaattggctcttgctcaatttttttaatggtgacggcaaccgctttaggaagtgcttttatttgccattgctcttgccactcatctttatcatctaaaaactcaaacttaagttcttcaatatcttctagaatcacttgagagcgtggttcaatattatctaattgatcaacataaacgcggtaaacacgttctaagttatcatcaataacgcgataaccaacagcttgtaattcagagcgtggcagtaagtttattgggttaacccagccatctcgtacaaagccgatgccatcgtattggctgtctaatacatagcgccctgctaaaatgtacgtatcttgaaaatcaccggcttcattgcgcacttggcgcttagtcatctgactaaaatcttggtccatcagccgaaacaatgtttgtaaaccgttaagttcagcaatggtttcatctgaggcatccttggctttggtcgtcgagtctaaaatttgatgtgttgagagcaccacgaaagctaaaatgcccatggcaataatcacttcaagcaaagtaaaaccgcgttgcttcactacttatcacctttatttaaataagtagaaagctcataaactgggtattctaacttttcatctgcaaatacattaatagtcactttaacaaaacttttgtcagcagttggcacgacatcttgtcgccaataccagtcaaaacctgcgagtgtctgcgtcccttttgtgccgttcttccctgcccacttttcacctttggcacgttgctcaaccatgacattttcagcaacccatgatgcatatgtttgctcttctatcgacgaaagatgattaatgtgctcaccagtcgcctgcatagcggcaatgcccgccattgcgcaaatagcgagtgcaaccattacttctaataacgtgaaacctgttgatttaatcattattctggctccctacgaagcttaacaggggccatgaattcgccttcaataaagtattgcggctcacgctcatctttaagctcataaaccaattgaaacgcactcacctcgccagaagagagtataagcacttgcggtattttcagcttttgtaactcaagtaaactatcttcatcaccgccactcattaactcgcgccagttagactgctcaagtaagttttgttcagcccatgctaaatcatcaagatttagtgttagcttaaaccgttcatcgactttaattggtgcaaatagtttttcacggtcaaaagttatccatttttcaccatcaaaaaccaaaaattcaagtgtttctttatcaatatgaaaaccgagctcaacttgattcaagatggcgaactcagatgccatattaatcgcggtatgtattttgagcgcttgtttttcgagttcttcctctgcccccccatcgaaactataagcgaccattttggtaacaaagccaattaccacaagcaccattaaaatttcgatgaggctaaaccctttggcactgcctgcccgagaagccaaatgcaaacgaccaaggcttaccataacagtaagccttgttcagtaataacattgagcaaatggctaagcatatacattattgcttttcttcatcccagttaccgatatcatcatcagtgccggcttcaccatccggacccatcgagaaaatatcaactttaccgatttctcctgggctgattagctggtatggattaccccatggatcctctggtagcttttcaagaaacccaccatcaggaaaacgcttaggaataggctcaatactcgttttagtaacaagtgcttcaagcccctgctctgtcgtaggatacgttttgttcttaagcttatagagacttaacgcatcttcgatttgttgaatatctagatgtgctttgtcgattgctgcttcttcttgctgccccataatatttggtgccacaattgacataatcataccgatgataaccagtaccaccatgacttctaataatgagaaacctgactgtttgttcacaaaaaatacctctaacttacttcaataaattattatagagcgacagtaataactgctactctaccgttccctgatttaaagacctacagctttattcattgccataattggttgcagtatcgccattacaataaacaaaacaataacagccattgaagctatcatcgctggctctaagagctttaacgatacattaaccatgctttcaaactcgcgatcttggttgtttgccgcgcgttctagcatttgttccaattcacctgatttttcaccactggcaatcatatgtagcatcatcggtggaaacagcttcgtttgctgaagtgcagcacgaaggctggcaccctcactgacacgcgttgctgcatcttgcaccgattttttcattttttcgttcactaataccccacctgaaatacgcattccttcaagtaagggcaccgaactagatgataaaatacttaatgttcgtgcaaagcgggcagtattaacacctctggctactttaccaatacccggtaaatacaacactttttcatcaaaccaatagcgaatatgcggtcgtttcagcgcctgctttatgcctaccgctagggctgttatgaccaccaagctaataaaccagtaattttgtacaaagttactggccgccataacccattctgtagtccaaggtaaaacttgcttagacttttcaaatgtctttaaaatcttaggcactacagtaccgagcaacacagatacgatagcaattgcaaatacaacaaggatagtcggatacaccatcgcttgtgttatttgactacgcatatgctgtcgttgttccgtgtaatcagctaaacgattaagaacttgatctaagtgacctgacttttcacccgctgccaccattgcgcgatataaatcatcaaacacatgcggaaactcactcatgccatcggcaagcgtatagccttcaactacttttgagcgtacggccatcaacatgcgctttaagcgtggcttctcacattgctctgcgaccgccattacagccccttccacaggtaaagccgattgaatcaaggtggcaagctgacgggtaattaaagctaaatctgaggtggagatctttggcttaaaaaaaccactaaagagagactttttagcccctttcacttgtttttcgccttctgccgcagcaacaacctctaaaggcattaggccttgatcacgcaaagtttggcgaatttgttttaccgtatcggcctcaagaatgccttttttctctttacctttaccatctaaggctcggtactcaaacgctgccatagttaaccttcctcacgtgttacacgtaagacttcttctaaggttgtacggccagctaatacacggctacagccatcctgacgaatacttgggctatgcttgcggatgtatttctcaacgctttgctcacctttaccactgtggatcatttcacgaattgtttcatcaacaactaataattcatgaatacctgtacgaccgcgataaccgttaaagttacactcttcacaccctacagctcgataaattgttggtggctcagcagggtttacacccagtagctgacactcacgttcatcggcaatgtgaccttctttacaagtattacataaagtacgcactaggcgttgcgacaatacaccaagcagggacgaagaaagtaagaaaggctcaacacccatgtcttccatacgtgtgattgcaccggctgccgtattagtatgcagagtcgacattactaagtgaccagttaatgacgcttgaacacctatttgtgctgtttcaaggtcacggatctcaccaaccattactacgtcagggtcttgacgaaggatggcacgcaaaccgcgtgcaaaggtcatatctactttagtatttacctgagtttgaccaatacctgggatctcgtactcgattggatcttcaacggtaagaatgttgcgatcgcgtgagttgatttggctcatacccgcatacaaggtggtacttttacctgaacctgtaggaccggttactaagataataccgtgcggcttactgattaaatcagcgaacaattcacggttacgctcagtcatccctaaatcttcaagattcaagcgcgcattatttttatcaagtagacgcagcacgacacgctcaccaaagcttgatggcatcgttgatacacgcacatcaacagcacgaccagcaatacgtaaactaatacgcccatcctgcgggatacgtttctctgcgatatcgagttttgccataaccttaattcgcgacactaacaatgaagcgagtttacgattaggttttaatacttcttttaaaacgccatcaaccctaaagcgaataacaagttcttgctcgaatgtttcgatatgaatatccgaggcaccttctttaattgcttcgctcagcatcgcgttgatcagcttgatgattggtgcatcatcatcactagccaaaagatcttcagtttgcggtaattcatcggccaacgagaataaatcaacctcgttaccaatatcttccatcatttgttgcgtttcagaactatcacgctggtacgaagcctctagcaatagctcaaatttatcatctggtaattgctctaacgaaaaaccatgaccggcaatacgacgtacttcaagcagggcatctaggtttaactcaccgcgataaaacacagtccagttatcttgatttttacttagcaatacgcctgtgcgacgtgcatacgagaacggcaaccgcttcgttggcaagctaacaagatcatcacttgttaaaagctcatcatgagtagttgtcgtgtcatggactaactcgtcattaatctcggtaattgcattagtcatcgttgcgctcattcgcgttttgttgttttaggtactcttcgtaagttggcggtaataccaaagcgtcattccattcaggaaggattggtgcatccgtcaacggcattaaatcaataccatcttctttttgtttgtgttgttcaccacgaataaagttatatttcgagtggcttaatttattcatgctaatgccatcgcgcacaatggtaggacgaataaatacaatcaagttacgcttgcgtttatttgtactcgttgaacggaataaatgaccaagtacaggaatatcacctaacaatggcactttagagacactttcttgcacgtcttcatcaatcaagccgcctagtacaaccatgccaccatcatcagccataaccgtagttttaattgcacgtttattaactgaaatatcaaccgctgtagcaccacttacgcttgaaacttcttgctcaatcgttaattgaactgctgagccatcattaatttgcggtgttactttaagttttacacccacttcttgacgttcaactgtttggaatggatttgcgttatttgagcctgtttgcgagcctgtgataatcggtacttcttgaccaacaatcattgatgcttcttcgttatccatggtcgttacagacggggtagcaagaatattagagttagtatcggttgaaacagcttggataattgcaccccagtcgtttttaacaatacccatggctagaccgttaataccgcctagcaattgccctaaaggacctaaatcaccttctacagtttcttcatatggcgttgtattaccagtctcactgcctgtaatcgttttttgtaccgttttatcacgtgcttgctcagctgcaacagctaacgaaccaacaggcactgttgtgccattgttgaactgcatcatcccgccttgctctgaaatccactgcaagcctaaattgattccatcagcttctaacacttcaacgataatagcctcgacaagtacctgcgctcggcgtacatcaagacggtctattacttgttcaagtgagcgcatggtatctggctgggcagtaataaccagcgagttagaatctgggtgcgcttcaatacttgtttcgttttggttgcgcgtacgagtcttagttccaccaccttgcgcatcttctgctagcgttttactcacaccctgtagtacttttacaagatcttcagcttttgcgtagtttaaatagataaccttggtattaccttggttttcaagctctccatctaagcgactgataagatcaacagcacgagttcgtgcttgtgcttcaccactgacaatcacactgttagtacgtccatcagcaacaactttagggatcaaaaactctggaatgctgcctttgccaccatctttgtaaatattatcaacaacagacactacatcgtctgcggtagcaaatttaagttttacgatatcaacgcgtttatcacccgcttggtcaactgagcgtataatttccactaagcggttcaccgatgcagcatggcctgtcaacatcatcacgtttgcagcattaaagttagcaacatggccaccatctttttggtcattaaactgacgaatgagtgggcctaattcttgtacactaacattcttcactctaacgacacgcgtcaccatcatatcgccactggcttgattatcttcagtgatcaaagggacgtttgatttttttgcgtctgagcttttctcaatcttgataataccgttatccatttctaccactgaataaccgtatacttcgagtacatttaagaagaactgataatagagtttttcatccattaattcgtagctgcgcacattcactttaccgcgcacactagggtcaataatcaccgttttatttaggtttttacccacgatattaatgaattcattaatatctgttcccttaaagtttgctgcatattcaacagcagaaactgaaagcgataatcctgttaataaaaaaagcgctgcatattttgctaaccctttcttaatttttctgaggtgtagcgcgtgaaccattctataaaaactccaaagctagttattgcaggctaaattgcacatcaatttgctcaccatcgcgttcgatagtgatgctggcgtcagtactatttcgtaattcgttaattgctgacattgcctgttttaaatcgtttaattgatagccatttattgcaatagctaaatcattattcattaatcccatttgcttaaatagcgcagggtcttttcctgggctcaagcggtagcccaccaattcaccgtctaccatcgcttgagaaacacgaatgtagtcaaataatttccctggatcgtctaatacttcttcgcgggtctcgataagagcgtcttttacctcttcgtcttctgtcgcgttaatttgttcaatttcatcaagctgaggaccatccattaaagctggctcttcacgctctgccaatactggcatagatactgttttagtgaagtcgagtccatctagcattagagtctcgaaacggccattaacatctaaaatgacacggtcaggtaatacctgagctagctttgcgcgagtgccttgaacagcatcatcaaccacataagtttcttgtttaccctgtgattcaattattgcaagaccagcttgatcattttgacttaccgcaacaattccagtcagatttatactgaggcgagtttcaggggcattgttaataactttattctgtttttttgtatcatttttactttcggctactgctttaccgaataaattttgctcaatgatttgtctcgagtttacggtttcaactcgttttgaagtggtataggcgctattgattggcaatgctttggtatcaggctccggccaaactagccaaaacaactttgaagataaaaatgcaatataaacaacaactaacagcactacaagtgcacttagcttggcgtgtggtaagccgtttaaaaactgtctaacttgttgtaagtgttgttccatatactctatttctttttttaatttacagcttgatagctggcctatagtaccttttcatttttcattcaacaagcacacctatattaaactttgtaaacgaggttattttgcagaacaaagcaggtaaggaatagctatgactatttctttgttattaagtttcatggtagattttgtctatatattagcagctttaaaagagcacaattgtgtcaaaaggtaacactcagcagtcgaaagatactaaagatgagttaagcgtgcgccttgataagtggttatgggctgcccgcttttacaaaactcgttcagtcgcacgagacatggtgcaaggtggcaaagtacattataatggacaacgaacaaaacccagcaaaatcgtcgaagtgggtgcagtcgtaaaactactgcaaggagtcgacgaaaaggttgtgataatagaaaagatccttgaaaaacgtcaaggcgcccccattgcacaaaccttataccaagaaactcaagcaagtattgagaaacgcgaagcaaatgctatcgcccgtaagaacaacagcttctttgctccacatcctgagcgtaaaccagataaaaagcaaagacgtgaactgttaaaactgaaatcaagttaggtaatgcaactcatgcaacaagatttacttcatcgttatatatttgatcagcttgatgtacgtggtgaactcgtacaaattgacaaaacttatcaagaaatgatcgcgaaccataattaccctgttgcagtgcaaacactgttaggtgaattgctcgttgcgacatgcttattaacagccacattaaagtttgaaggtgaaatcgccgtacaactacaaggtgatggccctgtaaaatacgctgtaattaatggtgacgataaacaaaatatgcgtggtgtcgctcgcctgcagggtgaagtaacaggcaacactattaaagaactaattggtaatggctacatggttattactattacacctacaaaaggcgaacgttaccaaggtattgtgccactagagcacgatagcttagataaatgtcttgaaaactactttgaacaatcagagcagttaaaaacacgcctttggtttgcaactgaggttacagcagaatcagcaaaagctgctggcttatttttacaagtattgcctgtaaataaagaaaagtcagttgaagactttacgcatcttgaagctatcagtaataccatcaaagatgatgaattattacacttagatgcaaacacagtactgactcgtctatatcatgaagacaacccgcagttattcgagccacaagcaatcaatttccgttgtggttgcagcagagacaaaactattgctgcactcgttaatgtaggccaagacgaattacttgcagatgtaaaagcaaatggtgaagtgaaaataagctgccactattgcttaaaagactacattttcgatgaacaagaaataaagtctattttcaattaaaactgcaactataatattattatattaaaagccgcactgagtgcggcttttttattaaaaaaagtttaaaaactaatgataccggtgtcatggaaaagtgacattttatgacaccggtatcattgaaattattcatgttttttgccaaatatatgcctttttaagcccttcagacactcgaatatccctaatccttctgttactattcttttagcaaaagggaaaactaagaaccccagagctatcccgttcaatctctcacaatttaggtataaacatgactgcaaacgctactagttttgttgatcttactgcagctgaacttgtcgaacacgctattcgtcgtggcgaagggactctagccgctaatggtgcttttgttgcaaaaaccggtgaacgcactggccgctctccaaaagatcgttttattgttcaagagccaagcactgaaaacgaaatccaatggggcaacgtaaaccgcccattcgatgcagacaagtttgacgcgttatgggcacgtgtagaacaacacgtgaaaagcaacgaccacttcatctctcacctagaagttggcgctgatcctgagcattatttaccagttgtagtaacaacagaaactgcatggcatcacatttttgccaaaaacatgtttatcgaaccacaaacatacaatactgctgacttcccagagtggcaggtcatgaacgtaccttcatttgtatgtgacccagagcgcgatggcactaacagcgatggcactgtaatcatcaacttcgcacaacgtaaagtgttactggctggtatgcgctacgcaggcgaaatgaagaaatcaatgttctctgttcaaaacttcctacttcctgcaaaaggtgtattaccaatgcactgttctgcaaacgtaggtgaagcaggcgacacagccttattcttcggtttatctggtacaggtaaaacaacattatcagcggatcctactcgtttccttattggtgatgacgagcacggttgggcacctggtagcgtatttaatatcgaaggtggttgttacgcgaaatgtatcgacctatcacaaaagaacgaaccagttatttggaatgcaattcgcttcggtacaatcttagaaaacgtggtacttgacgaaaaccgtgtaccagatttccatgataccagccttacacagaacagccgtgcagcttaccctctagagcacgttgaaaaacgtaaagtagaaaaccgagctggcgagccaaaagccgttgtattcttaacatgtgacgtgagcggtgtgttacctccagtttcagtactaactgaagaagctgcagcgtaccacttccttagcggttacactgcgaaagttggttcaactgaaatcggttcaactagcgacatcgagtctacattctcaacatgtttcggtgctccgttcttcccacgccctgcaggcgtttacgcagagcttctaatgaagcgtgtacgtgaattcggcgcaaaagtatacctagttaacacaggctggactggcggcccttatggtactggtcaacgtttcgatatcccaacgacacgtgctgtagttgatgccattgtatctggtaaactagctgacgtagaaactcaacacatcgacgtacttaacctagatgtgccagtggcagtacctggtgtagacagccaacttcttaacccaatcaacacatgggaagataaagagaagtacgcagaatacgcaaacaaactagcttcagacttcactgaaaacttcgctaaatacgatgtttcagaagcaatcaaatcagcaggtccaaaagcttaatatcaagcttaccttcagatttaaaaacgccagctatatgctggcctttttgtttttggatcatgagttagcgagagtagcgtttgaagtctgtcgtaggttgggtagagcgtagcgaaacccaacatcaatagagctttcagccgccagctgtcagccgcgcggtggaggtgttttgtaatgcgtctccatctgccgggggctgtagcttctaggctctaggcaaagtgtacttgtaggaatggctttagccatgaatgtgtttgttctggtctagattcggcactgaagtgcctactacgacgttttgttgctgagggtgactcagttacttaacaacccggtagatcaactaacatctattttctgacacctgacattctcatcacgtaggaatggtttctgccatgaatatgcttgttatggtctgaattcggcactgaagtgcctcctacggggttttgttgctgtgggtgactctctactaaacaacccaacaattcaactttacccttgctaactagaaactcgctaactcgttgggtttcgctccgctctacccaacctacctggagaatgaacagggagtgctgagggagtccctgtactaaacaaccccgcagttcagctgatgtctgatggctgaaagctgacagctctaaacgcaaaaaagcccgactctttcgaatcgggctttctctaatttggagcctggcgatgtcctactttcacatggcaaatgccacactatcatcggcgctgtttcgtttcactactgagttcggcatggggtcaggtgggtccaaaacgctattgtcaccaagcaaatttgggttgttaatcgcttttgcaattaactaaaatctggaattctgatattaagtaaatgtctactttagtgtcttaacttctgtctgttacgctgtcataaaacgcgtttggcgttgtatggttaagcctcacgggtaattagtacaggttagcttaatggctcgcaccacttccacaccctgcctatcaacgttgtagtcttcaacggcccttcagagactttaaaagtctagtgagaactcatctcgaggcctgcttcgcgcttagatgctttcagcgcttatcagttccgaacgtagctaccgggcagtgccattggcatgacaacccgaacaccagcggttcgttcactccggtcctctcgtactaggagcaacccctctcaattctcaaacgcccacggcagatagggaccgaactgtctcacgacgttctaaacccagctcgcgtaccactttaaatggcgaacagccatacccttgggaccgacttcagccccaggatgtgatgagccgacatcgaggtgccaaacaccgccgtcgatatgaactcttgggcggtatcagcctgttatccccggagtaccttttatccgttgagcgatggcccttccattcagaaccaccggatcactatgacctactttcgtacctgctcgacgtgtctgtctcgcagttaagctggcttctaccattacactaaccgtacgatgtccgaccgtacttagccaaccttcgtgctcctccgttactctttgggaggagaccgccccagtcaaactacccaccaggcactgtccgtaaccccgattaggggccaacgttagaacatcaacactacaagggtggtatttcaaggacggctccacaaagactagcgtctctgcttcaaagcctcccacctatcctacacatgtagggtcaatgttcagtgccaagctgtagtaaaggttcacggggtctttccgtctagccgcgggtacacagcatcttcactgcgatttcaatttcactgagtctcgggtggagacagcgtggccatggttacaccattcgtgcaggtcggaacttacccgacaaggaatttcgctaccttaggaccgttatagttacggccgccgtttaccggggcttcgatcaagagcttcgtccgaaaactaaccccatcaattaaccttccggcaccgggcaggtgtcacaccgtatacgtcatcttgcgattttgcacagtgctgtgtttttaataaacagtcccagccacctggtcactgcggctcccgtccgcttagagagcaagtctcatcacagataggagcgtaccttctcccgaagttacggtacgattttgcctagttccttcacccgagttctctcaagcgccttagtattctctacctgaccacctgtgtcggtttggggtacgattcggtataatctgaagcttagaggcttttcctggaagtatggcatcaacaacttcacacccttaggtgctcgtctcgtgtctcagtcttagcaacccggattttcctaagtcaccaacctactcactttcacatggacaaccaacgccatgcttgtttagcctgctccgtccccccatcgcaattataccaagtacgggaatattaacccgtttcccatcgactacgcctttcggcctcgccttaggggtcgacttaccctaccctgattaacatgggataggaacccttggtcttccggcgtgcgggtttttcacccgcattatcgttactcatgtcagcattcgcacttctgatacctccagcaaccctcccgggtcaccttcaacggcttacagaacgctcccctaccactcatacaaagtatgaatccgcagcttcggtgcatagtttagccccgttacatcttccgcgcagaccgactcgaccagtgagctattacgctttctttaaagggtggctgcttctaagccaacctcctggctgtctgggcctttccacatcgtttcccacttaactatgactttgggaccttagctggcggtctgggttgtttccctcttcacgacggacgttagcacccgccgtgtgtctcccggatagtactttacggtattcggagtttgcaaagggttggtaagtcgggatgaccccctagccttaacagtgctctacccccgtaagtattcgtccgaggctctacctaaatagatttcggggagaaccagctatctcccggtttgattagcctttcactcctagccacaggtcatcccctaacttttcaacgttagtgggttcggtcctccagttgatgttactcaaccttcaacctgcccatggctagatcaccgggtttcgggtctataccttgcaactatacgcccagttaagactcggtttccctacggctaccctaatcggttaacctcgctacaaaatataagtcgctgacccattatacaaaaggtacgcagtcacccaacaagtgggctcctactgcttgtacgtacacggtttcaggttctatttcactcccctcacaggggttcttttcgcctttccctcacggtactggttcactatcggtcagttgggagtatttagccttagatgatggtccacctatattcagtcaaagtttcacgtgctccgacctactcgatttcacttaagatgcattttcgtgtacgggactatcaccctgtatcgtcaaactttccagaatgttccactaacacataataagcttaagggctggtccggtttcgctcgccgctacttccggaatctcggttgatttctgttcctacgggtacttagatgtttcagttctccgcgttcgcctcttacacctatgtattcagtgtaagatacctgcaagcaggtgggtttccccattcggaaatcctagtctcaagcgctttttactagcttgactaggcttatcgcaagttaatacgtccttcatcgcctccaactgccaaggcatccaccgtgtacgcttagtcacttaaccatacaacccaaacgggtctttgttagtgacagctgttaacttcgccagaagttaattcatcaaataatgatgagaatactaaagtagataccgattaatcattgctgattaactggcatatttttacttttgaaaactctttatagatacgaatatctataagaattttaatatcagctttccaaatttttaaagagcatattaattagttaaaccaaacggtttagctaactaacaatcatctgtgtggacactacgaacaaataagttctaaatcgtataaggaggtgatccagccccaggttcccctagggctaccttgttacgacttcaccccagtcatgaatcactccgtggtgaacgtcctcccgaaggttagactatccacttctggagcaacccactcccatggtgtgacgggcggtgtgtacaaggcccgggaacgtattcaccgcatcattctgatatgcgattactagcgattccgacttcatggagtcgagttgcagactccaatccggactacgacgcactttaagtgattcgcttaccctcgcaggttcgcagcactctgtatgcgccattgtagcacgtgtgtagccctacacgtaagggccatgatgacttgacgtcgtccccaccttcctccggtttatcaccggcagtctccttagagttcccgaccgaatcgctggcaactaaggataggggttgcgctcgttgcgggacttaacccaacatctcacaacacgagctgacgacagccatgcagcacctgtatcagagttcccgaaggcaccaaaccatctctggtaagttctctgtatgtcaagtgtaggtaaggttcttcgcgttgcatcgaattaaaccacatgctccaccgcttgtgcgggcccccgtcaattcatttgagttttaaccttgcggccgtactccccaggcggtctacttaatgcgttagctttgaaaaacaactccgaagagtcgagcttctagtagacatcgtttacggcgtggactaccagggtatctaatcctgtttgctccccacgctttcgtacatgagcgtcagtgttgacccaggtggctgccttcgccatcggtattccttcagatctctacgcatttcaccgctacacctgaaattctaccaccctctatcacactctagtttgccagttcgaaatgcagttcccaggttgagcccggggctttcacatctcgcttaacaaaccgcctgcgtacgctttacgcccagtaattccgattaacgctcgcaccctccgtattaccgcggctgctggcacggagttagccggtgcttcttctgtaagtaacgtcacagctaagtgctattaacacttaacctttcctccttactgaaagtgctttacaacccgaaggccttcttcacacacgcggcatggctgcatcaggcttgcgcccattgtgcaatattccccactgctgcctcccgtaggagtctgggccgtgtctcagtcccagtgtggctgatcatcctctcaaaccagctagggatcgtcgccttggtgagccattacctcaccaactagctaatcccacttgggctaatcttatggcgtgaggcccgaaggtcccccactttggtccaaagacatcatgcggtattagcagtcgtttccaactgttgtcccccaccataaggcatattcccaagcattactcacccgtccgccgctcgtcagcaaagtagcaagctactctctgttaccgctcgacttgcatgtgttaggcctgccgccagcgttcaatctgagccatgatcaaactcttcaattaaaagttttttctgtcccgaaggacatgctcaatgaattctgaattttgatatctttcgatatcgaattgactgtgctgaaacaagtaaacttgtttccgttggtcactcagttaaattgagactctaaatttgtttgcgtcatctagcgaactagaatctgctgttagaactcaatctgtacgagtgcccacacagatgattgctttatattgttaaagaacgttttgagatacttttgcgtctcaagggctgtgcattctacgcaagccgttatttttgtcaacacttaattttgagaaaagtttattttttcaaaactcagtcttacttgactcaaccaactcgttgttctgcttgtttgtaagcagtccgccgtgtcgatggatgcgcattatagggagatccgaattgagatcaactgttttttgaagtttttatgaaaaaaatgactgttcgagcaaaatacgaacgaaacgggcaaaaagcacactaaatagggtcgtattatagctatttggccaatgaagtttatagataagcttgttttttaacttgtataagagaagatgtaactactaacgagtactatattgatctttatatgtgatcttagttgctagttgctagttgctagttgctagttgcttcaagattgtatggtaaagatatggggttggtagaggtattttagtaataatgaatttcagaaagtaaaaagccgagcataagctcggctttttggtgtctttacgacttactctgcagactgcgcgtcttcttgaacttcttcgtttgtcgctgggcgaccaactagttcaatataagccattggtgcattatcaccagcacggaagccacacttaagaatacgagtgtaaccaccaggacggtctgtattacgtggaccgatttcgctgaataatttaccaactacttcattatcacgcgtgcgagcaaacgctaaacggcggtttgctacactgtcagtcttagccagtgtgattaaaggttcaattacacggcgcaactctttagctttaggcaaagttgttttgatgatttcatgtttcaccaaagaaccagccatgttgctgaacatcgctttgcgatggctgctgttacggtttaattgacgaccactcttacgatggcgcatgaccctatccttctaactaaactaatatagtgatttagattattcagctaggcttgcaggtggccagttttctaggcgcatacctagagatagaccacgtgaagctagcacgtctttaatttcagttagagacttcttacctaagttaggcgttttaagaagctcaacttcagtgcgctgaactaaatcaccgatatattgaatttgctcggctttcaaacagtttgctgaacgtactgttagttcaagatcatcaactggacgaagtagaataggatcgaattctggcttctcttctttctcttctggctcagttacatcacgtaaatctacgaatgcatctaattgctcagctaagatagtagacgcacggcggatcgcttcttcaggatctaaagtgccgtttgtttccatatcaatgattaacttgtctaagtctgtacgttgctcaacacgggctgattcaaccgagtacgcaatacgttcaactgggctgaatgatgcatcaagcagcagacgaccaattggacgctcatcgtcatcagaggataaacgactagatgccggcacataaccgcgaccgcgctcaacacgaatacgcatgctgatctcgctgctatctgtcgtaaggtgacagataacgtgatctgggttggcgatagttacatcaccatcgtgctgaatatcagccgcagtcacagggcctacaccagatttagtcagggtcagaaaaacttcatctttgccttctaaagttactgctagacctttaaggtttaacagaatttcaatgatgtcttcttgtacgccctctttcgcgctgtactcatgcaatacaccgtcgatttcaacttcagttactgcacatccaggcatagatgataacagtatacggcgtaaggcattacccaaagtgtgaccgaagccacgctctaatggttctaaaactactttagaacgcgttgggttgatagcgtcgatatcgactaaccttggttttaggaattcggtaacagaaccctgcattttatcctctcttaactcttaactttacttagagtaaagttcgacgattagttgttcgttaatgtccgcagacagatctgaacgctcaggtaggcgcttgaagctaccttccattttcttaccgtcaacttcaacccaagtcggcttttcacgttgctcagccaactctagagcagcgatgatacgtgcttgtgttttagacttctcacgaatcacaacagtatcttctggtgagattacgtatgaaggaatgttcacaacacgaccattaactaagatcgctttgtggctaactaactgacgtgcttcagcacgtgtgctagcaaaacccatgcgatatacaacattgtctaaacgttgctctaaaagctgtaacaagttttcacctgtattacctttaaggcgagcagcttctttgtagtagttacggaattgcttttctaatacaccgtagatacgacgtactttttgcttttcacgtaactgtaaaccgtaatcagataagcgacctttacgagcgccgtgctgaccaggtgcagtctcaagtttacacttagagtcgatagctcttacgccgctcttaaggaacaggtcagtaccttcacgacgactcagcttgagcttagggcccaaatatcttgccatgttatttctcctaacctattgttaaacgcgacgtttcttcggtggacgacaaccattatgagggattggcgtcacgtcagtgatgttggtgatacggtaaccagcagcattcaaagcacgtacagcagattcacgacctggacctggacctttaatgaaaacttctagattttttaaaccgtattcttgagcagcagtacctgcgcgctctgcagcaacctgagcagcgaatggagtagatttacgtgaaccacggaaacctgaaccacctgctgtagcccatgatagtgcattaccttgacggtcggtaattgttacaatagtgttgttgaaagaagcatgaacatgagccataccatcagcaacttgctttttaaccttcttacgacgaattggtgctttagccataatctaccccaccttatttcttgataggcttgcgaggacccttacgagtacgcgcgttagtcttagtacgttgaccacgaagtggtaacgaacgacggtgacgtaggccacggaaacaaccaaggtccataaggcgcttgatatttaatgtaacttcacgacgaaggtcaccttctacagtgtacttgccaactgcttcacgcaatacgtcaagtgtttcgtctgaaagttcaccgatttttgtggtctcggcgataccagtcgctgctaagatagccttagagcgagtcttacctatgccataaatagcagttaaaccgataactgcatgtttatgatcagggacgttaatgccagcgatacgggccactaacacatctcctatatttgaatttggttatcatctgtttgaaaagcccgtaaggatactcaaacgaagaccaaatcacaactaaaaacacaggccgagtaaataactcagcctgcacgactgtttaattagccttgcctttgcttgtgcttaggctcactgcaaattacgcgtactacaccagcacgtttaataactttacagttacggcatattttcttaacggaagcacgtactttcattgctcaactccgtaaaatgaccttatcggccgtagcctttaaggtttgcttttttcagcacagaatcatactgatgtgacatcagatgcgtctgtacttgtgccataaagtccatgattacaacaacgataatcaaaattgatgtaccgccgaaatagaatggcgtttgccatgccatagtcatgaattcgggcaccagacagataaaggttatatacaaagcacctgccaatgtcaggcgtgtcatcactttatcaatgtatttagatgtctgctcacctggacgaatacctgggataaatgcgccagattttttcaggttatctgctgtttcacgcgggttaaataccaacgcggtgtagaaaaagcagaagaagataatagccgcagctaaaaccatcgcatataaaggttgacctggagtcaacgttgttgcgattgcttgtagcacatcagcgaccggaccttcaccctggccgaaccagcttgcaattgtaccagggaacagaattatactgctagcaaagattggtggaataacacccgccatatttactttcaacggtaagtgcgtgctttgagcagcaaatacctgacgaccttgttgacgcttcgcatagtttacaacaatacgacgttgtccacgttcgaagaatacaactaggtaagtaacagcgaatacgattacagcaatcaataacagtacaagtacattcagatcaccttggcgcgccatttcggctgtcgaaccaatagcagacggcaggttagctacgataccaacaaaaatcagaaccgaaataccgttaccgataccacgttctgtaatttgttcgcccaaccacataaggaacatagtacctgttactaaactcactacagcagtgaagtagaaaccgatacctgggttaacaactaacccgtccatcatgcccggtaagcttgtagcaataccgatagattggatagtagcaagcacaagcgtgccgtagcgtgtatactggctgattttcttacgcccttgctcaccttctttcttaagctctataaacggcggatacatatgcgttaatagttgcgtaataattgaagccgagatatacggcataatacccagtgccaacactgaggctcgctcaagcgcaccaccgctgaacatgttaaacatttcaacaatggtgcccttttgttgctcgaagaaatcggcaagtacagcggcgtcaatcccagggatcggcacgaatgaacctagacggtaaataatgatagcacctaatacaaatagtaatcgacgcttcaattccgaaagcccactttgtgcacttttcatatcttgacctggtttagccattagtacttccttagtcttctaccttgcctccggcagcttcgatagcttcgcgagcacctttagtcactttaagacctttaacggtaactgcgcgtgaaacttcgccagatttaactactttaacgaactggatgttctttttaactagaccagctgcttgtaacgcgtttacgtctactacatcgccatcaactttagcgatttcaaaaaggttaacttcagtagatactaatgatttacgtgaagtgaaaccaaatttaggtagacgacgttgcataggcatttgaccgccttcgaaaccaacgcgaactttaccgccagaacgtgatttttggcctttatgaccacggccaccagtcttaccaagaccagaaccaataccacgacctagacgtttcttttctgtttttgcaccagcagcaggtgaaagtgtattcaaacgcatcgaattaaccctcaacctttaccatgtaagaaacttggttaatcataccacgcacacatgctgtgtcttctaactcaacagtgtgattgatacgacgtagaccaagaccacgtaatgtagctttatgcttcggtaaacgaccgatagagctctttacttgtgttacttttacagttttattagccatggtttaccccgtgatttcgtcaacgctaagaccacgtttagcagcgattgactctggagagttcatgttctctagagcagcaatcgttgcacgaacgatgttgatcgggttagttgaaccgtatgcttttgacaatacgttctgtacaccagttacttctagtactgcacgcatcgcaccaccggcgatgatacctgtaccttcagaagcaggctgcatgtatactttagaacccgcgtggcgacccttgattgggtgctgtagcgtgttaccgttaaggtctacactgatcatgttgcgacgtgctttttccattgctttttgaattgcagctggaacttcacgtgctttaccataaccaaaacctactttacctgcgccgtcaccaactacagttagtgcagtgaagctaaagatacgaccacctttaaccactttagacacacggtttaccgcgattagcttttcagccaaatcaggctgttgttgctttgcttctacgttagccattgtctactcctagaattgcagaccggcttcacgcgctgcatcagcaagcgccttcacacggccgtgatatttaaagccactgcgatcaaaagcaatcttttcgatgcctttgtcagctgcacgttcagcaaccgctttaccaactgcttgagcagccgcaacgttacctgtgcctttaactgtttcgctaattgctttttcaacagtagaagcagcagccagtacagtaccctcagcagtaactacttgagcgtaaatgtgacgtggcgtgcggtggataacaagacgcgttgtgccttgttcaatataatttctacgagtgcgtttagcacgacgtagacgagctgtttttttatccatcgtcttaccttacttcttcttagcctctttacggcgtacattctcgtccgcgtaacgaacacctttacctttataaggctcaggtttacggtatgcacggatgttagcagctgtttgaccaactaactgcttgtctacgcccttaactagaacttctgtttggcttggtgtttcaatcgtaataccttctggtacttcgaaattaactgggtgtgagaaaccaagagttaagtctaatactttgcccttagctgctgcacggtaaccaacacctactaactgaagtttcttctcgtaaccttcatgcgtaccaacaaccatgttgttgattagagcgcgagcagtacctgcttgtgcccatgcattagctacgccttcacgaggtaaagttgtaataacgttgtcgttaacttgaacttcaacagcgtcgttgatagtacgagttaattcaccgtttttgcctttaactgtgatgtcctggccttttaatgtaacttctacaccggcaggaacattgattggtgcctttgctatgcgagacatagttcccctccgattaagctacaaagccaatgatctcaccaccaacgccggcactacgtgctgcgcggtctgtcattaggcctttagaagttgatacgatagcgataccaagaccacccattacctttggtaattcgtcacgtttcttatagatacgtagaccagggcggctaacacgctggatattttcaataacagctttgccttcgaaatattttaattcgatagaaagctcaggcttcgcttcaccgcttacagcgtaatctgcgatataaccttcatcttttaatactttagctactgctactttcagttttgaagttggcatcgttactgatactttcttcgctgactgaccgttacggatacgtgtaaacaaatccgcaataggatcttgcaagctcatagtcttactcccgtgatactattaccagctagcctttttaaggccaggaatttcaccgcgcatagctgcttcgcgaactttaatacggctcatgccgaatttgcgaaggtaaccatgtgggcggcccgtaacgttacaacgattacgttgacgtgaagggctagaatcacgtggtaaagcttgtagctttaataccgcgtcccaacgatcatcgtcagatgtattaacatcactgatgatagcttttagtgccgcacgcttttcagcatactgagcaactaatttagtgcgctttgcttcgcgcgctttcatagaattctttgccataaccctacccttatttcttgaatgggaagttaaacgcttctaacaacgcacggccttcatcatctgttttcgcagaagtagtgatagtgatatcaagaccacgtacacggtctactttatcataatcgatttctgggaagatgatttgctcacgtacgcccatgctgtagttaccacgtccatcaaaagacttagcacttacaccacggaagtcacgaatacgtgggatagcgattgaaaccaaacgctcaaaaaagtcccacatacgctcgccacgtagggttactttacaaccaattgggtaaccttcacgcactttgaagcctgcaactgatttgcgtgctttagtgattagaggtttctgaccagagattgcttctagatccgcaacagcgttatctaggatcttcttgtcagctagagcttcgcccacacccatatttaatgtgatcttttcgatctgagggacttgcatgacagagctgaaaccaaacttctcttgaagctcagcaactactttgtctttatatacttcatgcagtttcgccatcattctactccaactattagatagttttaccagtagatttaaagatacgtaatttcttaccatcttcaatcttgaaacctacacgatctgctttacccgtttccgagttgtagatcgcaacgtttgatacgtcgatagacgcttctttctcaacaataccgccagcttggttcaactgaggaacaggcttttggtgcttcttgattaagttgatgccttcgacaaatactcgaccagattcagcaacaactgaaagcactttaccgcgcttacctttgtctttgcctgctagtacgattacttcgtcatcacgacggatttttgctgccatgatagactccttatagtacttctggtgctagtgaaacgattttcatgaacttttcagtacgaagttcacgagtcacagggccgaagatacgagtaccaattggctgtaagttatcgtttaagataacagccgcattgctatcgaaacggatcaaagaaccgtccggacgacgaacgccttttttagtacgcacaactaccgcgtttttaacatcacctttcttcactttaccgcgaggaattgcttcttttacagaaactttgatgatatcgccaaccgctgcatagcgacggtgcgaaccgccaaggactttaatacactgcactttgcgagcgccgctgttatcagcaacgtccagctgagtttgcatttggatcatgttaatgacctccggtgtagaaattacaacacgccttaattttgtttaaaatcaagacatttcggttaaattccactcaaaaaacaagcaagttgtctcttaagggcgggcaattgtagcagcaatggcaaggaagtggtaggttattttttaattaatttggaattaatcgcaatgcctgcattgaggaattacagcagcttgctggtttgttattgattataaaacaaacagggcgcaaatgcgccctgtttttgactttaattaaatttttattaattaccaaatagaccttttaatttgtctttaattttatctttggctttttctttcacttcttctttagccgcatcacttacatcgagcttatagccaacatcatggaatggacctttgatacgcagtggaattttaaaccctgtactgtcatcggtcgtgccttgcccttcgattgaatcaacaatacctgttactaaacggtaatcaactgtcgtcattggtaaatcaaccttacctgagccagtaatacgaataagcgggctaagtagtgacaagtctttattttcaccaacaccgttagtgaatacaaagctaccctgcaatgccgagaaatctgtttgctgtgagttatcaaagccagtatctaaaccttctgataccgcacttaagttacctttaatgagctctttggctttacgaaccatttctgcaatgttggcacctttcactgcgccatcagcaaactcaaaggctaacttaccattcaaggcattgatgaagctcttttgactttggcctgtagtcgttagatcccagtttagagagcctttacccattaacttatcgaaaccagccgcatcagtcagtaatggctgtgcatcgattttatctaaagcgaagttggtgctaattttatacggtatttgcttggcattgaccgtgattacacctttaccattaccctcgtaagcaacaaacttatctaggctgattttagctagtgcatttttcaggtttaccgttaactggttttcaccaagggtaatatcatttgcttttaagccacttgaacgcacgactacatttgcatctagtgcgtttaagccgctcatatcaattgcagtatcatcccaaacaattggctgtgcaggcgcatctgctgcaggctttgcttgttcttctttagctacgccctcaggtaagtaagggtttaaatcaagcatgcctaaatcaatatcggcattcacagctaaacggtcaccaagcttaatatcgcttttacctttaatttgtagctcatctaacgtggcaagtagctcagtgagtttaaactgctgcccttttaggtgcattgaaccttttatattaaaggcattaaacgcattttcttttgcattaagctcaacaccttgccagcttgcaatgtttttaactgaatcaccgctaacagaaagaagcccttgcacgtcattgcccatttctgcaattgcacctttaaagttcaaatcgactaggcgagaatcaagctctgtgctgacattaaaggtttcgccttcaatcgcttttactggtgtatctagcgtgacatctaagttaaagcgctcacccatataggtaataccgccttttaattctaaggtcttacgaagagaaggtaataagatggctaattctaaatcacttatctgttgtttggccccggttttaccatctaggtaagtgaaagtgccgccatagattgctacttcaccaagttcgatatcaaagttatctggtaagttaacagcgccagaacttttttgctgctctgtttgtggttgctcagcaacggcatcaaataactgccagtttgctttaccatttttatcggtttctaataaaatcgttggttcgttaataacaaacttatctagcttaaactcaccgccaaatagcgacatccacgggatacggatagcaagttgctgcatgcttgccatatctttttgcgagccagtttgcatattggcaaagtgtacatcattcagttcgagctttaatgatggaaataccgacagctttttatcgccattaattgtcagactacgacctgtggtttgttctacttgctccgatactttattaaatatcgcgtctgtaggtatgaggaatggtgctgcgactaccaatacaattagtaatacgaaaatgacaccaacgattttcaataaggttttcataatcatccttaaaaatgggcaaacaatgttcatatcatagcgggagttaggcgcaaatgcattgcccaacacataaaaagctttgtaaacaagcttaggtacaagaatatgaatcagcgctgaaacattttgatacctataggttacaaaaagctcttgactaaatgataccctagggttacattgatacctgtaggttacatttgagttgaaaataaaaggaaacgattatgtctaagcaagatatcaaaacggaagaaaagtttatgagtcataacgcatggttttcaatattcatgggagtcacgttattaattattagtgtttacccaatgctcaagcaaacatcagttcctttactgtttattggtggtgccgcatttattggttcattctttatgtttgtgattcgaggtggatttacatggaaacttggctatcgccttacgtataaggatgaatttttaaatacgattgataccatcgcttataaacatgttgtgcttggattactttttagcatgggggcgatttttttattgtctgatgaacttgctttaaatgtatctcatagcatgatggccacattttaccttgccttgatgtgtttaatatatggtgtatcaattatttggcaaagtagagactaggtgtaaaagtgcaaaataatatcgctaaattccgtaaagataaggggttatcgcagcaagaacttgctgatgccattgcagtatcacgtaaaactattagcacagttgaaacaggccgctttataccctcagtgattattgcgttaaaaattgctgctcactttgaagtggccgttgagcaattatttacactcgatgacaacgattaatctaaaaatcagtggcaatcttacttataaattatcagtaagattgcatcatttcattacttcggtatgatgcacgaccctgttgtttttgcaccctgtgtactaaaattaaacaacccaatttggtcaaaactggagtatcgattaagcatgaagaaactgcttatttcaccgtcaaaaatggcgcttggcgagcaagaaagtcaaatttatcaaaacatcctcaagcaagcctctgatatcagcttaaacctaatggcagttaaagtagaaaatcatcctgaagactttttaggttggtgctatgagctattaagtgcaagccgcgatcgcattaattacgatctattagaagataagcaacttcctacgctaaaaaaacttcatgacttattaatttctgcaatcagctttttgcagttaaaaaccttaagggttgcgccatggccggttatcgcaggcttcatcgaacagcatcaagagctaatagcacttgatgagcaactacgcttagctaattacattgctgcaattaaatcgcaatcactgaaagagatgatcccagaagaccgtttagctttttctggtaaacacagtgcctcgcttgatccaagcagctataacttcgacgttgaatggtttgcttctaccaagaacgcaaaaggtttccaccaaatgttgagtgatttacctggcgcatttgatgaagcgcttgcacacattccactggagggtgaagtaacgcaagaacattatcagcattttatggttgcttacttcatggcatttaatggcagcgatgaaaaaccaacgcttgctcctgctactcgcttacttgcgatgcgccgacctgacgtgtttacaccaatcgtaaatagtaagctcgatgctctttgtgcggcattaggcattactaagcttaataaccgcgattttgagcgctactggcaagatgttgtcgaagccattcatagtatgccttggttcaaaatggccaacgcagcaaatgagcttgaacactctctggttgaaatcaaagccctattaccgagcttcttttattatgcagataaaagtaccgctgataactcaaactatattaagttgttaaacaaacctaagagtaccacgagctcagcaggtaaaaagaccgtacgccgtggcaaagaatcagctgagatactggtagaccgcgcactagcaagcgatgatatccctgaacatatcaaagctaagcgcgattcaatcatcagtgaagttgaaaaaggccgcagcgtcgaagaaacaattagtctaatgcgtgcaatttttggctaagtcactctcaaacaagaaaaacctggttgcttcgcaattgtgcaaccaggttattttttgcaccacgcaagtgcgcatgaataattcaaagaaaactaatttttaaaaaatagtaagcttaataggctgtttttaaagtagttaagcataaaatatcccttccaaaagtaacttggcacaaccagtgctacatcgtatccagacaacacataattatgtccgcaaacaataatcaggctgcaacctgaactagggcaaaatcaacataacaacaggatacagaaacatgctaaaactaaaaaaaacgttcgcagcaagcgcaattgcgctattaacgttaagctctacatatacttatgctgaagtaacagctaatgcagcagcgacttctaactacttgtggcgtggccaagaacaaacaggcggcgatgcagctatccaaggcggcatcgattacgctaatgaatcaggcttttatgcaggtacttgggtatcgaatgcaagctgggctgaagacatgacttacgagttagatctttatgctggttttggcggtgacattaatgaaaccgttagctatgacgttggttatatatattatgcgtatccagatgcagcatcatctgctgatgctgatttttcagaaatctacggtagcatcagcatgggcagcttcacctttggtgcagcaatattagcaacatcagcagcaagcggtgacggtacagattttggtgattcactttatttaaatgctgactacagcttcccagtaggaagtactggcgcagaaatggctcttcatgttggccattactctggtgatttcatcggtgatgatgacatcatcgactacggtgtttcagtatctaaagatggctttacatttggtcttgccgacaacgatatagatggttcagatgtaaaagtgtacgtcgcttacgcggttgacttcactttataaagaatgtgttacttgctgcaacacgaagggccgtaaggcccttttctcgttttggactttacgttttaaggcacactatgaccggttgagccttgccaaatgcgataccattgttcacgattcatagtaagctgcttagcttcaacagctgatttaacacgctcaatattacccgtaccgagtaccacagacggtgcactcgggtgcattaacagccaagcataaacaacctgatcaatggcagtagcaccaatttcagcaccaacctgctctaacactgcacgtaaacgtaccgctttttcatcatcacttgagaataaacgaccccctgctaatggtgaccaaagcataggtttgatatcaagcaattggcattggtctaagctaccatcgtcaagcgctttcatttcgtaaggtgaaaactcaatttgattagtcacaagctcaaagtctaaacgcgactgcaacaagctaagttgcgatggcgtaaagttagacacaccaaaatcaatcacatcaccatttgcttttagggtattaaatgcttctgccatttcatcggcattcatcaagtaatcaggacgatgaataagtaatacatctaaacgatcagtattgaagtttttaagtgactgctgtgctgaggcaataatatgcgcggcacttgagtcataatgatttgctttgccttgcaaccctaggcttgcaaaggcaggcttgataccacacttggtgattattttgatttcatcacgaatgcttggttttagtttaagtgctttgccaaattcagcttcacaaccgtattcaccgtaaatgtcagcatgatcggtatgtgaaacccccatatcgattgcattttctaaaaagcttaagcattgctgtggcgttatctgccaatctaacaaacgccaaaaccccaataccaactcatcaatacaacgtacattacaattcgccataacgacctacttttcctaataaactcgactcaaattaaccgcttaaccttatcacagatttactaatcacatctgttaacatacagttacaaaacaaattgctaatttgttactaaacaggatattttagtacctaaaaacaaatgttataaaacaaggaataaaaaatgaaatcatcaaatgttatgaccgctttggttgatatttttatcagtccaagtaaagcctttaatggtttaaaagaagcaaaaggctggtcttttgttgcctttattttacttgccggcattctcgcagccagcatgtttgctttttacaataaagctgacccgcaatatttaatcgatcaacaagtcgctgtagccagtgttgatgccactattgcagaacaaaaaatgattcgccaaagcatggagcaaaccatagatatgcaagtttggtttgcaatgtttggtggcattattggtttagctgttatcaatgctctgatggcaggttactacctatttgtatcgaagcaagacccagaagctaactacggctatggcgcgtggtatggctttggcatttggaccatgatgccaatgattatttcaagccttggtttacttatcttagtgttaactgcaagcactgaccaaatatcacaatcattatttaattatgcttcaattaaccaacttttaattggtttagaaattggccacccactgtacaccttacttgaaagtctcaatatcttttctatttggggcattttcatcgcagctatcggtttaaagtgctggactaatttcactttcaataaagcgctactgtttgcagctctaccaagtattgttatttacggtatttggactgtaatcgcgctcgtttaactctgctttgagcggcaatatgccgctcttaactaccaaggaagtaacatgaaaaaagccattattattggcctcgctgttacggcatttgtcgctttactagtatcaaagcaagtcacaggcaataaagatgcaccagaaatgcatattgcagaagttgagcaaggtaatattgccgattcaattttagcctctggtaacctagtctttaatacccaagtgcaactgcgctcagaagtgaccggccgtgttgcgaaagtgtttgtagaagaaggcgaaagtgtcactgagggcgatattcttatgcgcctagataccacagcgtttgaatctgaagttgcccgcaacaaagctgtgcttcgcgcaaccgaaatcgacattaagcatagcgaaacccgcttgaaaaatatcgagcgtcaattaagccgccaaaaagagctttatgaagttggccttgctggccaagaagtgtatgaaaacctacaaaatgcccgcgatttagcaaaaatagatattgaagcaaaacgcgaagcttacaaccaagcccaagcatctttattgattgctgaagaccgtttgaataaaagcgtgtttcgtgctccgatgagtggcctacttgcttcggtaaatattaaagaaggtgaaaccgttattgcaggaacaaccaacataattggctctgatctgatgctagtagcagaccccagcgcaattttagccgaacttcgggtcgatgaaaccgatatcgccggtatcaaactagaccaacatgcagacatctatgccgccgcttaccctaatcaaccttttactggcaaagtcataaacattggcacatcagcaaaaaatcaagcaggttcacaaggcttatcatttaaagttaaagtactgcttgatgccactgaccgccagctatatgccggaatgagttgccgcgcagaaatcgctaccagcattgccgaaaatggcttaaaactccccatcgaagccattcaaaaagaggatgatagctactttgtttggaagcttaacgcagataacaccgtaactaaaacagcggtaacggtaggtatttcgtcagatatcgaacaagcactaaccagtggagttgcaaagggtgaccgtattgttatcggccccgctagaccacttagctcactaaaagagggtgatacggtagccgttaaaaacagccctgaaaaaggtgctagctaatgtctgcggtgatcaaactctgtaatatcaataaacaatacaaaatgggcgaacaagttttcaaagcccttgatgatattaatattgaaattgctcaaaatgagtatgttgccatcattggtccttcgggctctggtaaatcaaccctgatgaacttgcttggctgtttagatactcccaccagtggtgactactatttaaaagataagctagtaaagcgcatgaccgaaacggagcttgctcatcaacgtaatgaaagtgttggctttatttttcaaagtttcaatttattaccacgagcatccgcccttgaaaatgtcatgcagcccttagtgtatcgatttattgctgccaaagagcgaaagcaacaagcgctcgaatcattacaacgggttggccttggcgataaggtaaaccacctttcgagccagctatctggtggccaacgtcaacgtgtcgctattgctcgcgcattggttactaagccccacattctacttggtgatgagcctaccggtaacctagatagtaaaaccaccactgagatcatggcgctgtttgatgagcttcataacgaagggcacaccattattttggttactcacgaacaagatattgctgatcactgccaacgggttattcgtttggttgatggcaaggttgttagtgatacccgtaaaggcgaaggagaaaaacaacatgtttaaatctgctatcgctgttatggaaggcactaaagcggcattgatggcaataaaagccaatgcaatgcgcagcgcccttacctgcttaggcataattattggtgttgcagcggttgtgaccgtagtggcagtaatgcaagggtttaccaagcaaattaatgatcagcttgctgatatgtctcccgatgtgacaaatataaagccttacactagcgtagaaaaagaaatggtaggccaacaagcaaagctaacctacagcgactttttaaccctaaaagcacgcgttaaagaagccgagacctttactgcgctgatgtttacttggcgcttttctggtgcagcagagtatggcaataaaagtcatgcttcacgggtaatgggcaccgagcaagactaccaaaaagcttaccgcacctacccagaactcggccgatttattcgcgcagaagatgatgaaaaacgccgtcgagtggcgtttattggcccttcaattatcgaaaagctcaacctgcctgaaaaccctgtaggtgaatatatcaaactcggtggtgagtggtttcgcattattggcgttgctgaaaaacaaggtagcttattaggttttgaccaagacgattacattaatataccgataagtaccatgagtgcgctagaaggcggcagtgttgataccaatgtgcaaatgatgtttcgtttaaaagacgatgctaacgaagcgcaagtactggctaaaattcgccgcatcttacgtcaattacataaactaaaagacggcgaagatgacgactttgagtttgaaaccgccgaaaaagctcgtgctaatattgataagtttaccggaagtgcaaccgcaattaccgcggggatcgtaggtattagcctcgtagttggtggtattggtgtgatgaatatcatgctggtttcggtaacagaacgtacgcgtgtgatcggcaccttgaaagcattaggggcaacacctggctttattatgctgcaatttttagttgaagcagtggtgctatcactttttggtggtttaattggtttagcgatagggtatggtgctgcggcactaatttcagtgttagtgccgagcatgccagatgcctacataccgggttgggcgattatgctgtcatttggctttacttcattgattggtattgtgtttggcttagcgcccgctattaaagcggcacgcttaaacccaattgatgcactacgttatgaataactagtctggcttataaggtacttgagcacagcttatttcgactgttttcgggtaccaaattggcccaacttggtttactgcaacttcagctaaaccattggtgaacgacttataagtgtgaacggtttgccactcagagtctgggcactcttcagataagtcgacaggctttgaaccttcgtaaagcgcagcggcaaagttatgatgccattgctctgtcgcaggtgctttattagcttgagcagcactgccattatcaaagtagatatttgtgcaaccacttaaggttgccactaacacagctgttactagtaggcttttcatagttgttgctcctgtgcttgttgctcacaccagacttttactgtgtgaggagcataaattccgagtgtaacgagtcctaatgcaccatcagcgaatgtttgttgcgattgcatttgggcaacttttttatcttggcaaatagccttaacatcaacacgctcttcaccaacgaagccccacaaaaagaatgggcgactatcttggtaatcagctttagtggctaatctattagttgttttttctggcactatggtgactgatgaacacgctgtcaccgataaggcaagcagcatacaggccatttgtttcatgagtagttcctttgtctgagttgttaagctcagtaagtataagaacatgagtacttgttttgggtaagaaagcgtatagaaattgtagaaaatactacagtttctaacatttagtctttgaactaaactggggctaactaagactaattcttaagaaaagtaaataaaggtcattatggcgtcatatctgcgtatatttttattacttgtgtgcttgggtgcactgtcttggtatagcttttcaagcggtcctagctcagatgagcagcaaggtataaccaaaaccgctgtggaccttgctaattgccaacagcagttagcacaaagtcgcatgcaaacttacgctgaacattatatcctgccttatcagttcaaattattgagttggaatatttacaaagcacaaatagatggcttactcacagatttgcaaaagctaaatgacaatgcagatatagtgttactgcaagaagctatcgaagagcctgcgcttacaaagctcaaaccttactggcgctttgctaaaggctataagagcggcggcgtgcaatcaggggttatgacgctcagccgttggcctgccgcggtgcattgcaccctcacccatgttgagccttggctacgtagcccaaaagccactaatatcgttgaatatgcgctgccagatcaacagttattgctgagcattaacctgcatggcatcaactttacttttggcgttagtgactttaaacaacagctcgacgatgcagctagtatcatgcgcatgcacaagggacctatcgtgtttgcaggagatctcaatacctggagtgatgaacgccaagctttattacagcaaacattaacccaactaggtttacacgaagctatctatttagatgataaacgtaccaaagcatttggattagcgcttgaccaagtatgggttcgcggtgtcaaaatagaaacaaccgttgttcctgagcttgcaagctctgatcataacccaattattgcaaccctgacgatagagcatcaaacgctatgagattatgtataaaagaatattggttaatcgcgttaatgttattgagcattagccaattcagttatgcagcgaccccagaacaagagataaaccaccttattgattttgttgctaagagtgatgccatatttattcgcaacggcacagagcactcaagtgaagatgctgccgaacaccttgcaatgaaatatcgaaaagcaacccgctatgcaaaaactgccgaaaagtttatcgaaaatctggcgagcaaaagctcatggagcggtaagccttataaagtaagactcagcaatgggtctttactcaatgcaaaagattggttaagcaatgaattaaaagagtaccgccgaaaccaacatattcataattaaaatcatcaacacacaagaagcgaaaagccatgcaagaacacaaaaatcagccactcaatgactttattgagtaccctcatgacgagatgcttaaacgcgccgaagagtttttagccgtgagtcagcgtcgccacagtattcgcagttttagcgaccgcccagtgccaaaagaaataatcgaaacctgtattaaagcggcaggcactgcaccaagtggtgccaatcatcaaccttggcactttgtagcaatacacagtagcaatgtgaaaaaacaaattagagaagcagccgaaaaactagagcgttcattttatgaaggtcgcgcaggtgaagaatggttagatgccttaaaaccacttggcaccgatgccagtaagccctaccttgagcatgcaccttggctcattgccgtgtttagtcaaaagaaaggcggtatttctgccgatgacaaaaataccaattactatgttcatgaatctgttggcctagcaaccggctttttaattcaagcactacacagagctggccttgctaccctcacgcatacaccaaagccaatgagctttttaaccgaaatttgtggccgcgataaagataatgagcgcccttacatgctgcttattgcaggctacccaagcacagatgcaaccatccctgagcatgccttagtgaaaaagtcgctggacgaaatagcgacctttatttagttttaaaatcaacagccagcacatcccccgggtttaaacctgaaacgatgtgctgctgtccatcgaccatttcgccaaggcgtacgtagcggcgcactatctgattattttcaagtaaatagaccatgctcaattggccatattgatgcaccaagcttgagtcaatcaacacccctttttcagtggcgagcggtaattgtaattgtgcataaagcccaggcattaacccagtttgcgcatctgtttctaaacggatttccatactacgcgcagcactatcagcaaccggcacgatttctgtcaccgtggcaggcattgatattgataaagcaggtaatttgaccgttagagtttggccaacattcagcttaattgcttgttgttctctgacattaaatgctaattgcaattgttgtgggttatacagtgcgagtaatggcgtgccaggagttgcggtatcgccgggctctgcaaaacgctcaaccacaacacctgaaatcggcgctttaatttgcgtaaaactcagtgcaacttgcgcttgtgtttgctgctgtttagcaatcgctaggttcgcagttaaattatcgaaccttgcttttgcatcgtcgtattcgctaacagataccaaaccttgcttgtataaatcgttaatacgctttagttgtttctctgcttgagttagcgatgcattaatagcatttatttgtgcttcgctttgagcaagtcctgctttaaagtcatcttgctgcaaggtaattagcacgtcaccttgttttacagtatcgccagcgcgtacatttaaacgctcaacttgtgccataacccgtgatgagatttgcgtattttgtttggcaatcacagtgcccggtacaacttcatcacgcgcaatatctgccagtgtcactgtcactaactgaccagtgtaatcatttgctgatgggtttttcatgcctgcagcttgcttatcagaaaaactgcccgccatgtaaagtaccgccacaataatcactgataacgcgacaattgaaccaataagttttgatttaccctgcatgagcttgttcctctttggctgcatcctttgcaaacactaaataataaaccagcggcacaacaaataatgagaacaatgttgatgccacaataccaaaaataattgcgatcgctagaccgctaaataccgggtctagggtgataaccaagttacctaataaggtggttcccgctgtcagtaacacagggcgcatacgcaccgtacctgcggcaatcaaagcttgcttaattgccataccttgaccgcgagcttgattaataaactcaactaaaataagtgagttacgaaccacaataccggcaagtgcaatcatgcctatcatggctgttgctgtgaataacaccggctcaggagcaccagcaatgctgcgctctccaaattgatttaatagccaaaagcccggcatgatccctattacggttaatggaatagccgacatgatgataagtgataaactcgctgagtttgtttgaatgcgtaagatgatgaaaatggcagtgagcgcaaacgcaaaggcaatccccatatctctaaatacatcaatggtaattcgccattcaccttcaccactaaaggtcacgtcagtgccagcaggtaattgccaagcttggctaccaccattattgaaaaagtgcctactttgccaatcagtttggctaaattcgtcagcactaatggctaagtcggcattgacgtcagcaataatttcagcaggagtacgaccatttagctcagccataacatatacaacattacgctgatctttacgcataattggcttggcaacatcttgatgctgaaattcacctaattcagataacgccaccagcggacgcggcgcactttgcaacccaaattcatcactggtttttgcaagctccctatcaccacggacttgtaatgccagcaattgagcaaattgattacgatcttgataaggcagttgcagtttaatatcaacaggatctgtttcgccgctaacatataacactccaacattttgcccatgcgaggcaatggctaaggtctgggcaatatcttgcgtagagaccgccgacaatgacgctttacttttatcggtaacaaaacgctgtaagggtgcattggcagcaatactggtatcaacctcaaccacatgcggctcttgttttaaccttgctgcaacagcaagagctgcttgatagtgagtctctgtatcaacaaatggctcactgtaaacttcagccactaaggtacttaaaacaggcggacccggtggcacttcaactactttaattacaatgccatcggttgccagtggcgctaatgcggcacgcaagcgcatgaccacgccatgagattgatgatcacgctcagttttatcgagcagtaatactctgagttcagcaaggttcgctgcttcacgtcgataataaccacgcaccataccattaaagtccatgcttgatggctgaccaacgtaggctgccgcctcgcttacttcatttaattgccaagtgatggtttgtacttttcgagtaaaagcggcggtttgttcaaggttcgtgccttctggcatatcgattaaaacttgtaactcgtttttattatcaaacggtaatagctttaaaggtactgcacgcattacgggtaacatggcacttgcgacaaacaaagctaatgtggtccatagaacgagtttggcacggcctttagactcaagtaatggtgataatatgcgctcgtataagctatgcggattggcttctagttgcatgctgtcatcaactggcgctttcagtaatttcatggccaaccatggtgtgacaaaaaatgccactatggttgaaaccatcacactgaccggtacattgaatgccatcggagccatgtacggccccatcatgccggtgataaaagcaagtggaataaacgccaccataatggtcaatgttgacataaacagcgccacacgaatttcgctcatggcatcaactatgctttgttttttatcgccttttttcgttaaaaagcgacttatgttgtctatcccagtaatgggatcatcaaccaataaacctaaagaaagtattagtgcaaacagtgtgactcggttaattgtatagccaaaggcaaaatcaagtgtcagggtaatgccgtagcaaataggtactgctaaaccaaccacaattgctggtcgccaacctaaaaatacgccaacaaaaataaccacggtaaataccgcaaacactaagctcgaggtaaggttatttactttttcgttcgcggtttggccatagtcacgcagtacggtgtagcccacttcatctggtagtagattagccgataaactatccatcatgctgtgcacttcattggctacagctaccgcattggtgcctgcttgtttagcgacactaatagtgactaaaggaagttgttgctgattatctgatttagccaaccattgataactttgtgcttcgcttggcccatcactcacctgggcaacatcacttaggtaaacactcttaccattaaccacattgacaacaagccgttcaatggcagattgagagcgtaaaacatcacccacttgtaaggcaatttgctgcttaccctcaacaacgctgcccacattcaccaattgattagatacgctaagcgcataatacacatcggttaatgttgtttggtgtgcagcaagagcacttgcatcaaggttaatcgttaattgacgagttctacctgcaatcactttcacttcgctggtattttcgatgcgctgtaaactgttagcaatttcgttggcaaagcgggttagttgataatcatcgtaaagttttggatctttactgaataagcccagcattacaatgggtacatcgttcacttcaaccggacgtatttgccatgaacttatcactgacgccatcgtgtgttgataactatagagtttagcgtaagtgtcgagaatggcttgctcacggtcgtgaccaacttcaaagcgaagagtaacaacagcagcattactttgtgtactcgagtaaatatgctcaacgcccgtcaattgcgctaataacttctctaatggttcagttaccagcctagctacttctggcgcttcgacgtttggtgctgccacataaatatcaagcattggaaccacaatttgcggttcttcttcacggggtgtttgctttaatgccattagaccaagcagcaccgacataataaaaataatgacagggaggcggccgctcaagctgttttttactgcattatcgatagcattcattgcttaattacctttgcaaaataagccatgtagggtcgctaagattgataccacgttttcatccaccacgcggtaataaatagtttggctttcgcgtcgagtcgcaactatctgagcttttctcagcgccgctaagtgttgcgataatgctgactgcgccaatggcactgcttcatttaattcgctcacgctcatttcaccatcttgcagcgaacataagatcatcaaacgatttttattcgccaatatctttagcatttgctctgcttgttccacattgtcggccatagccgcaaaatcgatgttcataatcacactactctatattcttaaaataccgctaaagtatagattgatatattagaaaagtctaatattagaatttactaatgtagtattatctaatatattaaatacatcactctgttatcgaggtctttttatgaaactaaatgacgcgcttcgcctaattgctggtgtaatgatctgtatttcattgttgctacaacagtttcacagtccgctgtggatttggtttacggtatttattgctctaaacttaattcaatcggcattcacgaaatggtgcccaatgatcaccattttacgcagacttggcatggaggattagtatgctgacaccaattcctgacttaatgaaaattgttgccccaaaccagcgccgcattagcgctgaccaagcaaaacaagaattaagcgaaaaccacggtttattaatagacgtacgtgagcctgctgaacacgcaactaaagcagcaacaggtgcaattaatatcccatgcggtgtacttgaaatgaaattaatggaaattgaaaaagatcctgcaagacccatttacttacactgtgcaagtagtgctcgtgccacactgagtgccgaagctctgactcgtgttggctacgaaaatgtcactgtaatcacctgtaatgcaaaacaaatttgtcaggtgttttaacttcatagaacagtaacactggtcggataagctcgtacttttctacttataggtacagagcaatgacttttacacgcagacgctttttaaaagcatcggcggctggttttggagccgccgttttatctttcggtttaacgggctgtagtcttaatgacgatgatgacgaaaccacaaagcaaatccctgtcagctttgatcacggtgttgccagtggcgaccctctcgctgacagtctcattatttggactcgcataacaccacttgaaaacgtcacgagtgttaacgttgtttggcaggcctcaacagatgctaacttcacaaccattagccatgatggcgaaacacaggtaagcgatgtaaccgacttcaccttaaaagttgatctgcaaggtctcgatgctaacactacctattactaccgcttcataagtaatggtaaaacctcacctactggagcaggtaaaacgcttccaaccgacaacatagaacaagtaaaatttgccgttgtctcttgcgctaactatcctgctggctactttcatgtgtatggtgaaatcgcaaaacaaaccgatttagatgcagtactgcacctaggtgactacatctacgaatatggtaatacaggttatgccactgaaaatgccgccgaacttggccgtttattacctgatgacaatagcgacgaaatcatttctttagcggattatcgcaaacgttacgcccattatcgtaaagacgaaaacctgcaagctgcccatagtcattgtgcatttattactgtttgggacgaccatgaaataactaatgatacatggcgcagtggcgctgaaaatcacaacggcggcgaaggtgaatttagcgagcgcaaaatgcatgcgctacaagcctactttgaatggatgcctatccgtaatgtagccgataaagaacgtatttatcgacgcttcgagtttggcaatttagtgtcgttacacatgctcgatacccgtgttttagctcgcgacgagcaagttaattatgcagatttcgatttaaccagcagccaaggacaagctgactttgttgcagcaattagctcaccgactcgtgccctattaggtaacgagcaacttacatggctaactgatggtttaacaacagcaacaacacaatggcaagtacttgggcaacaagtgctgatgaccaaaatgcatttgccatttgagattttgcagttacttatgaatattcaagtgactcaagcaagcggtgctgacccatctgcattacttgctcaagcaaacacgttatttagtgagcttgcgcaaattaaaggccgtatattagctggcgatccaacggttactagtgagcagcgagcacgcgtagaaacaacagcgccttataatcttgatgcatgggatggctatgcttatgaacgtgaggtaatacttgggactgcaattgcagcgcaaaagaacttggtggttttagcgggtgatacgcataacagctgggcaggacaattagtcactgatgacagtaaccctgtttctgctaaagctgcagctggtgttgagtttgccacatcttcggtttcttctccgggtcttgagaactacttagcgttaaatacgcaaccgagcgaagctgtcgcacaaattgagcaagttattgcattactggttaacgacttagcttacaacaatttagtggaacgcggttacttaacggtcacctttactcaacagcaagcactagcccagtggcattatgtaagtagcgttaaaacagccgattacacactgcttagcgagcgtcaaaaagcgctcagcgtacaagctggtaaccctactttacaactggcttaacgcttttcatctaatagcgtaactaacatttgctcaatgttttttacgctataagtaagtgaacgcagcagttctaactgactatcttcaggtttatgctcagctttagcactgctgctttgcgtcatttcatctttttgcttcaagattgcttcgcgaaaggcctctgcatcaaccactccgagtaatgacaccagtgcaccttgtcctgattgacctgccgtttcaaaactcagtcgataaagaccaaattgacgcattaaaggaccttggctaagtgccacatcggttattttttcaagtgggatcgatttttcttctttaaagaatacaccgcgttttaccactaacttacgcgtaaacaacgtggctgacatcgccgctaaaatacgccctgccaccagccagattattaacgcaacaatgggaatgaaagggatacctaccatactaatcacacaggtaaaaatacccagtaataaccaatactgttttacttttggatcaaagctggcactcaataaactggtttctgtcatcataggctccttgataagtagttatgacaatatacaaacttttcattaaatacaaaaaaagccgagcaaaagcccggcttaagggtactgcagggaaagctactccactgcttcaaccgtcactgttagtttactaagatcaggtccttgcactgtaaaacggtaatcgccagcagctgcaatactcagggcgatattggcaccaacggcttctagtaaagcggcttcgccaagtacagcaacaggggcatcaccactgccgccataatctacggtactccaatcttcagaagcgactttgaactcataatcacctgcttctaatgtcatggtggtactgtacatcgcatcaccagcataaatcagtgggttatctgtgccccagccattaacgctaccgcgtaagtacacctgagttgcgccaaacatttctgcattaaatacactcatgagtggctcttcaaggttgctggcatcaaacacaaactgatattgaccatcgcttgcaatatccattgtcatgtttgcaccttttactgcgagcagtttttctgtacccacagtgactgccgcgctgctttcacctgagccataatccaccgtactccagtcttcagaggctactttgaattcatagctacccgcggttaactgtttagtgaaggtataaatacctttaccttgatacatcagctcgtcactggtaccccaatcatttaagctaccgcgtacataaattgcagtgccaacaaatggctcttcgttataaaccttaagtactgggttatcggtgtctgtggcatcgaatgagaacacataaacagcatccattgccgccgtaaagatcatattggcaccactacgtgttagcggctcatcttcaccttcgatcacttcagcaacatcggcagaaagcgcaccaaaatcaacggtagaccaatcttcagaagcgactttaaactcatagctgcctgctgttagaggaatggcaattttgtactcgccattacccacatattcaaagctatttgccgtaccccagtcgtttaacgagccacgaacataaaccgtcgtgctaccaaatggtacgatatcaggtgcccccacagtcgcatcggcacttaggccttcgccttgtgcatcagcttgtggtttcacaaacacagcaacagtatatggcggaacattaaaggtaccttcgccctcaccagctataaagcttgccgctgacatactagagtcaacactcgcttttaaaacaggatggagctcaaaacccgcagccgttgataccgtatgcgataagctttgctcagtgccgttcatcaccacgacaatggcatcgtattggctatctagatcagtcaaaccaacaccatcatcgatactcatcacgactaagccttgctgttgacgcttaccaatattgtggaagccaacgcggtctaagatgtcttgctctgtggttaaactaaataatgggctggcactacgaattgctaagaactcagtaaatacattacttgcgtattcaatgtcgctagccatcgcttgcgcattcgtatttgccgaaataggtgcaatttcgccccacttcgcttggttatcttgcgcaggcggtaaacctacattccagttgttggtttctttactgaaatcaacaaagttgaaccaatcaccagaatcatagctgttacgatccattgatttagaacgcagcatatcagcacccatttgcataaatggaataccttggctcatcagcggcatagctaaagccatattgtgaacacgcacacgctcttcaatacttaagttagtgccatgtttatattgcagctgatcccacaatgtttcgttatcatgcttagagacatagttaatgctgtcagcagggtcaagtgcataagccgcaggctgaccactccaactaaagctactgccttttgctgaattacctttaaagtctttaagaatgtagttttgtaagttacctgccagtgataaacgcaacgtatcttgctcagataaattgccatctgtggcattattgctaaagaatgcaccaccacgaattgcttcacggatacggtcattaaaggtgcctacttcagtgcctgccatatccatttgtttagcttgcacaaataaacggttatcagcgacttcaccaaagttccacccttcaccatagaagtaggtatcagggtcaaccgcttgcactgcactaagtgcggtcataattgatgcttttggcatatgccccatcacatcaaagcggaagctatcgtaaccaaaatcacgggctagaatcaccatagaatcagcaacaaacttatccatcatgacatgttctgttgctgtattttcacaacaggttgagcgctcgatatcgcctgatgtttcgttatatctgtggtaataacctggtaccagtttatcgaagactgatttatcccaaacacctgatgaggtcgtgtggttgtaaacaacatcaagtacgacacgtaaaccaatttcttgtaaagactggaccatcgcacgcgtttctttaactcgtgcaataccttcaggcgatgaagcgtaagagccttcaggcgcaataaaatgatgcggatcataaccccagttaaagctatcaacaccacgcattgcattagcaagtgcttgagcatcatcagagccaggtaggtaagacgccattaaatcaactatcaatgcactcttatcttcggttttacatgcatcggcatcatcattaatgcggctacataaatcacctaaggttgcagtaatatcaacacgctgactagcatcttcatcaatggtgccaatatcagtcagtggcagtaaatggaaatgtgttaagccattatctgctaactttttaagatgttgcattggtgcgctatcaagctcagtaaacgctaaatacttaccacggtttgcttcactgactgtttcatcacgcacactaaaatcacgcacatggccttcataaattaccgcttgctccgggtaatcaattgttggcaccataagctcatcccagccagtcggtttagtatcttcatcatcaaggttaatcaattggctatataaaccattggttgaaacattgagtgaataaggatctgtgctccataagctttcaatttgcttagtcgtcggatgataaacatcaaacataaagcggtagtaatgacgatcgtgactgatatcgacattgctagaccaaatacccgttgcgctatcaaagttcatagcaagttgttcaagctctgttttatcagcatcatacagcgctaatttcatattgcttgcagtcggcgcccataccgacacatcaatgccattattggcgtaatgcacaccaagttgtgcttcattagcgtcactttcgccactggtatataagtcatcgagggctttagcggtttgcacataggttgcttcaattagcttgccatcagcatcgtagcctgccacaactaactgctgtttaataagctcttttgcagcggctgcatcccagctaccttggtacgcattccatccagcaaggtgtggcactttagcgatttgttcatcgctcaaagatgtcgatgtaagctcaactacttgaccatttaactcaccagtatcttcatcaacttttaaatcagcactgcttgatgagtgtaatttaatgatacttgtcagctcattacttggctgataaatcacagtagataaatctatccaatgcgctgatgcaccagaaatactcaccggacgttcacctaagctaacaattggatattcaaatactgatggttcaccatgaatggtaaagttcatgcgttggaacttttcatcgtcctgcatcaatggcatttttaaatcaacatcaccaaacgctttgccagacccttctgtaccaatatgcacgatgaagttagcacactcgttgtaaccctcttttagttttacaatccagtacgcgccatagttagggtcaataccatcgtattcatgaccatttgcccaatcagtggcatcaaacggtgctgcgtaagaatcacagtcatcgttattccatgagtgtaatcgatagccttcgtaggcatcgtcactggtgcggttatagaataaaatggcttcgtcatcagcagggaaaaccacaggatcaggtaaagtgggatcagcgcctactacgcagctttcattattctcatcgggtaccgttggtgccggacaactaatcggcggaggatcaacacactcagtccccgcttcattgggaacttgtgggacactacaggtcaataaaacttgccctgaatctatatcgttacttgcgccaccaccacatgcagctagcaataccatgctacatgcaatcagtaagcggctaaaattagctattattttcatatttttatctccaacttactgatcaatggttataggtaaaacctagataaaactgacgaccaaagaattgcgtggtgcctgttttactggttgtcccaaagtagctttgtgttggttcatcagtcaggttattcacttgtaataacatgccgaatgaatctgtgaactgatacgatgtttggaaatcgacaaccgtttccgcatcaaaattcaccacttgctcattgacagcaacttgctctgatacgaaatcatcgcgataacgcacattcaaacgtgtttcaaagttttcatagctgtaaaaaagtgtgccgttaaaaacattgtttgaaaggccaggcaagtcttgcgatacagaatcgccacctaaatcggtgatagactgcacttcgctctctgtatacgagtaactagcgttaatacctaaaccttcaaacggtgagggtaaaaaagagaaaacttgcgtataggcaagctcaataccacgaatataaccgcccttagcattgttaaccgcagtggtgtacacaccattagtggtttcgatttgctcaccgctgactgggtcgactatgtattctggtacgttaaaaccattccctttaaagtcaaagttctctatggctaccgtatctatgaatgagtcgatattcttataaaacgcagcaacaaccagtgcaccatcggtgtcttcaaagtattgctcgtacgagatatcgtattgatcagcatagaaaggttttaagaatgggttattggtacttgaaccgttaatttcgccgtcattgttaaccgatgcactggcatcgcccgctaaacggttaatcggagcacgcgccatcacttttgccgcagcaaaacgaatttgtgtcgcgtcactcactttaaagttcaggtttaatgaaggcaggtagtctgtgtatttaatgcctaacacgcttggtgcatataggtcgttaacaatgccattgtcgtcaacaatatactgcgcaccgagttgcggatcgccaccgacgttttcgagtaccgtcgctgactgatcggtatctacacgacgaataccaatattacctgtaacgggtaaagtgccaatttcagtatcaatgttaagcatcagataggctgacaccacctcttcatacactgagccactttgtaacatggtccatgaatagttagtggtataaccttgtgcatctggctcaccatcaccatctaaatcaacaacaccatcggcattaccccaggtttgtactggctgcggaataccacttgggaaccacgcgttgagcgctttatctaaatctatcgctaggtatgatgggaaatagctaaactcaccttgccaatctaccactgtagccatgtcatcagtaaggcgaagcggtggttgagtcgaagagaatgcgccgtcgttaccgtactcaaatacagagcgattattgctgtactcacggtctgaataacgcgcaccaaattcaatggagctaaaccagttgttctctaactcatacttaaaatcgagtcggaacgctttgacttcatcttcattttcatacggataaataccgtatttactcaccataacgcggtcaatatcgctaaatgcgtcggcttggttaaaacctacatcaggcaagtttaagccgtttaattgatagttaagcgatacattggtatcgaacacagggttctcaacggtggcatcttctgcaaccaatgcccaaagtaaaccattacggaaattactcttagcacgagataacgacacatcagcattgacattcaaacgctcagtaatttgccaatcgccattaataccgtagctgtctacttcatcaaagtcttggttatcatcattaacgatttcaacacgggtaaagctgtttgatgtgcggttaatcgcgccaccaatcaccgcattaccgtcaagtactgggttagcataaaccgcagacggaccaccaaacttaacccgaaaaccacgggcaaatgattcgctatcaaaacgcgataaaaacgcatcaccttttagtttaaagttatcggctggtgcccattcaattgaggttaaataaccattacgggtttcttcaccacctaagtgctgaagctcaaaaccctcgctaatgtattcattagcagggttatctactggaccatcagtatcattggccagtccatcaacatctttattgccgttataagcaaaaccgataaactgcgtcgccacacttggctggaatagtcgcgcgtaacccaatgccacacctaacgtatcgtcaagaaatttgccttgataagaaaagctaatacggtcgccgtattcggtggcatcaaatacctccgaagcacggtcgttatacataccacgtacattcgcagtaaatttgtgttgctggtcgttatccaatgggctggctgtttgtagctctactgtccccgctacgcccccttcaatgagtgaggcttttggcgacttatacaccgccgccgagctgattaactcagacggatattggtcaaactcaatactacggctaccactggtagatacttgctcacgaccgtttaatgtcgaaaaaacaaatccacctgataaaccgcgaatgttgatttcggcagcttggccaccagtgcgtaccgctgagatccccggcagacgtgttaatgcatcagccatagacacatcaggcaatgcgcctagatcatcggctgatagctgctcagagacagtgtcactaaaacgtttttgatttaatgattgaattaagctgcgactaaagccgcgcacttcgattacttctagctcaggatcgatttccttcactgatgtgcgttcttcttccgtcgccgccattgcactatttgctgccactaaagctagcataagcgcacttagcttgaatttccccattggattcccaccctgttgtcgttggaagtgttgtatttgtggttattgttgttgtcaaaacacaaccaataaagtgtaaccaaaaggtaaatattgtgtgatgaatacgtatgcaataggagcttgctggggaaagcagcgatcacaacccttttttattcgtgatgtaatcgcaatatagagggttttatagggtaataacgacgcgaacagctagagcaataaagattatccctagcaatttttcaaaccacggattcgctttggtaaaaccaaaacgcttttttgatatttcagttaacagtgcaacaagtagataccagcctgtatcaagcacaaataccgttaaacacatgattaagccaacctgcaaagtcaggctctctggatcaataaattgcgaaaacagtgccaaaaagaacactgctagttttggatttaaaaaggcaatggcaaagccatcttgcaacgcgctgcgaggacttggcttagcctgctcaacattcagtgtttgcgggctaggtttagctaacaaaatacgaatacctaaatatgccaggtatgctgcaccgccatataccagcacttgataaagcgttggtagctgcgtcatcagcgcgcctaggccaagtaacgaggcacacgcataaaaaccaaccccaataccatggcttaacgccgctaacatgccgtttttcatgccgccatgtaggctatgttttaatactacagctaaactcggccctggcgacatcgcacccatcacgcaaattaaaactaaactcaaccactcagttagtgtcattattcgttattctcaattagtaataaaacggatgttatctgaccataaaacccagtggcagtggtaattgttttcacttgccaaccagcttggcctaactcgaacacccgttgatttaatgcctcaatatcgatgccaccgaaaaagcgcttctttttaaactcaaccactttttgcatgttagtccatcagttggtattcaaagtcataatgatgaatacccgattcaattcgaattgccattttaccagaaagaccttcaagctctcctgcgccggagtctggcaccacttctaaatcaatcggtcagtccccttatccatggtgccaaaatgttgcagtacaaaactaccttgcttaccttctaagctaccaacaacttgttcaatcgctacataacctgcgctaccttgagttgcagtcatggcactgagcatttcaccttggcttgttgcatctaatggccctgagaactgtttatcaatcgacatgcgtcctaaattaacgccatccttacctgttgcatagccgccaatagggtttaattttacagtgaattgcccgctgataattgtagattccatactaatcccttaataactgttgatttttagagcattgataaccatatctataccctattcaccaacaagaatctagcatgtctaacaataaagaaaaggccgcatttagcagcttattaccgattttagcttttataaaaccctacaaatgggtagtgtttgcagcgcttggcgccttgttgcttaccgccggagtcaacttatctcttggacaaggtgttaaatttgttattgatcatggttttattgcaggctcacaagctcagctacagcaagcagtgatggtactgattggtttaattagcttattagcggtaggtactttttgtcgcttttatttaatgtcatggattggcgagcgagtcagtaacgatattcgtaaagccgtgtttgaccgcatcgttacattacacccaagctactttgaagaaaaccgcagcggcgagctgatgtcgcgtctgaccactgataccaccttgttgcaatctattataggttcctctttttcgatggcattacgcagtagcttaatgctcatcggtggcttggttatgctacttatcactaacttaaagctaacccttgtggttgttgcttgtgtgcctgtggtattactgccgatgatgatttttggccgaaaggtacgaaaactcgcaagctcaagccaagatgccattgccgatatcagcacctacgcaggcgagatcattcaaaatataaaagtcgtgcaaagttatagtcatgaagagcgtgaaaaagcagcatttaacgaagagactaacaaggcgtttcaagtagcaaaaagccgcatcaaacagcgctcgttttgattgccgcggtgatattcctgacctttagtgctattagcgtgatgctgtgggttggcggcagcgacgtattagctggcaccatgacaggtggtgagctaggtgctttcgtgttttatgcgattatggtggcgatgtctgtagcaacggttgccgaagtgtacggtgagctacaaagagccgcaggtgcagcagcgcgattattagagctacttgccgttgaaagcatgatcaaaaagcccagataaaaatcatgatgcacaacttgaaacaaacaagcttaatcactctgctatcgagtttaatgatgtatcttttcattacccttcaaggccagataaagccgctttaaatgcgctaaatttacaagtaaaacaagggcaaactgttgccatcgttggcccatcgggcgctggtaaaacaacattgtttgaattactgcaacgtttttacgacccaagttcagggagtatttcgctggcgggcatagacataaaagcactctctcttgattgcttacgccagcaaatggggatggtggcacaaaacccaatttatttagctcagacgtaatgcacaacatacgttatggcaacccaaacgccactgacgagcaagtatatgcggcggctaaatatgctcatgccgatgagtttattaatcaacttcctgatggctatcacagctttttggggagcaagggtcaggctctctggtggcaaaaacaacgtatagtactggcgcgagcaattttaaaagacccagcaattttattacttgatgaagcaactagtgcactcgacgcacaaagtgaattcatgtacaagctgcccttgagcatctaatgaaagacagaacaaccctgattattgctcatcgtttggcaacagttaaacatgctgatgtgattgtcgtaatggataaaggagaaattattgcaatgggtacgcatcaacagttgtttgagactaacccattgtataaacaattgtgcgaattacagtttaatcgagattaattaagcgagtcgatataagaagagaaatgtcaggtttgaaagggcatatcaaacctgaccacaaatctagatgtaatatctaaccttgtgtattcggtacgatctgaatttctacgcggcgatttaaagcacgaccattagctgtatcgttgctcgctacaggggcgcgtttcaccatagcctcgcgtgctgatgcgtgcagatatgatctgatgattaactaagtaatcttttacactttgcgcacgttgctgagataacgtcatgttgtagctatctttacccgtgctgtcggtatggccttcaacacttaagtaggttttttcatacttgttcatcacttgcgcaattgcatcaagagtactgtgaaaacccgacgagatataagattgatcagtcgcaaaagtaatgtttgatggcattactaaacgaatattgtcgccttcacgaaccacttcaacaccagagcctgctagctcatcgcgaaatgcttcttcttgtttatccatgtaatcgccaactgctgcacctgctaatgcaccaattgcagcaccaatgaagatacgtttatcgtcatggtcgcctgttgctttacctaatacagccgccagttgctgcaccgattgctgcacctttacctgtgttagttgtttcacaaccgttaataaaacggccaaacgcccactgttaaaactgatttactaatagtcatgtgtctctccatggcaatattaattcgaattattatccattataattaaacaacaatgaacaaactatgaagaaaagttaattatcaatagccgcagctgaaacagccggtaagttatattccgccactatttttgttaggcgaccatcgagaactaggttgttcagttgagtttgaatcttttgagcaaactcagacttagcaaattgcttacttaatgctaagtgcccaaaaatcacatcatcaaaacgatacgacatcttttttacactttgtgatggcctttgcaaaatggctgctgaatgatccgctgtttcctcaacagcaatgaccaaatcaactctattcttcagtaacatttcaaaggcattgtgttcacttaaggcttcaactttggtgagtgttttatctttatcgaaacgagaaaaatgggccgctcctcgcattaccgcaatgcgtttaccaactaaatcttgatattatttactgcaaactcgctatcagcttttgcataaaaaacaaaggaagatgacaacatcatgtagggtggggttaaaaattgcattttttgctcacgagcctctgtggcggataagcccgcccatcacatctagctcattttgctcgagcatttttaagcagcgcgaaaacgggcaagcgacaaattcaagtttcatggaaggctgctttgcatttcgcgcatgatatcgactatcgccccactattggcctgactctgataccatgccgtaaggcggcgcatgatcaacagccaccacaacttttcaaaagtagttgcaaatgcaaaggagctagccagtagtaacaacaaacttgtaaatactgcttcattagtgatactcataactacgttcactcgttttctatattgtagacggcctagtgtcataaaaaccacaaaaatgtcatacaattttgtccataatagaaacaactatcctgtaacggcaaaagtaatgttatttgttatctttaaacaattctttttattgggctgcatgagctttggcggcccagctgcacatcttggttactttaaacgtcattttgttgataacttaaaatggctcaccgctgagcgctatgcgcaacttattagcctaagccaagcgttacctggccccggatcaagccaagttagctttgcaatggggttgaaaaaggaggcttattaggtggcctatgtgctttattggctttaccctgcctcatttttaattatgttctttttggctcttagtgctcaccaatttggtgatatttactttgcggtgatagccgggcttaaactctttgcggtggtgattgttgccgatgcaacctacagtatggcaatgagcttttgcaaaaaccacttacacaaacttatcgcggtactgagcacggttgcgctgattgtgttttcacagttatcgagccaaattatagtacttattgcagcagcagccttaggttggttttatcctcaacttaaactaccagagaatcaacaacacaaatcagtcaaaattgcttggttaccgcttggtttatttactgttttgttactggttagctttttacctttaggtgagtggttttctgtgtttgccccattctatcaaactggcgccatggtctttggcggcggtcacgttgtgttacccattttacaagcgggtgtgccgagtcttgaaaccgagcagtttttatctgcttatgccagtgcgcaagccataccagggccaatgtttaccatagccacatacttaggcgcacagatttctccaaatacgccactcataggtgcgattgttgctactttactaatcttcttacctggctttttattaatgttagcgtttatgaaaagctggttacaattagctgataagccacgctttgcggtagtatcgcagcaaatccgccgtggtaggttttttagccgccgccctttattcaccaatttggcagtcggcagtgcaaaatctgtggcaagtaggcttggtagttgccgcatttacttggctaagaatggcaaagccaccaatttggtggctattgttaggctttattgcttttagcgtactgattggtcagttttaagctttttcgcgcggaggattagcaaccttaatacttggctttagccctgtttgtggctcactcgcacttatctggcctgtaacactctgataaggtctaagcgcgaaaattggcaacactgcaagtagatgatccattatctctgcttgcaagtgctcataagaaatccagcgtttgtcttcactaaaacaatagaattcgattggtaaaccatggttcattggctgtagctcacgcaccatcagggttaaatcacgatttattttttcatgctgcttaagataaccttctgcatagcgacgaaataagccaaggttggttaccggatctggcaagctagaaacacgaatatagtcatgcagtggaatagctgtgtctatttgctcacgaaacgcatcgtcaactaagcgaatactattcatatcgatgtttaaagagcgtttgatacgacgaccgccagactcttgcatgccacgccagtttttaaatgacccagcaaccagcatgtaggttggaatggttgtaatggtgttatcccagttacgcactttaaccgtgtttaagccaaggtcgataacctcaccgtcagcaccatagctatctacttggatccaatcaccataggtcactaaacggttagctgcaatttgaatactggcgacaaaacccaaaatagtatctttaaatacgagtaaggtcactgccgctattgcaccaaagcctgagagaatataagttggcgacttctccagcaaaatactcacaatgagaatggcgcaaaccataaaagtgatcagtttaacaacttggattaacccttgaatcggaatgtctcgagcaaattcaagttgattataaataccgggcaatgctcactacactacttaaaatgaagccaccataaatatgagcgcaacttgacctactgtttttaaaacgagtgcagcaacatcatgaacaggataaacataatcgaaagttgctaaataaaggacacagcacaaaagcaccagcaaagcggcgatttagtttattgagcattggtgcaagcgcaccaatacgctcaggtgacagacgagtaacgaccttttgaatgcctggcaacaataaacgacgggtaaacatataaattaatagtaatgagccaacgccgatagctgtcgccgttaatgcacttacaagtgtcgcgtctggcattgattcaaaccaaggcatcactaattttcatggcgcttcaacctctttattgatattagcaatgtaatccgcttctttagcctgatgataacttagtagctgcgcatctttttgcaaccataaattattgacatactgttgaaaagtcgttctaaatgcacgatcgtgctgataatcgccaatcatgcgctaaaaatgcacatccactttaatcacgtttaagcggccacgcaggttacagatgtgatcaccctcgccttgataaataatcgaggtatttaataatgcatcaaactgctcacctaacacctcaagagcaaaggcaataccgcccgctttaggctttaaaaggtaactaaatgggctattttgctttttgtttttggcacgtaaagcgtgtgccttcaacaaagttgataatagttgttggatgattacgaaagtcgcggcaactgcttggttccaaggccaattgcgctttactaacccgcttcataaaaggcatgcccatggcccatgcaccagtgccaatgaagggcacatattttaattcatcttttaagaaaaactttggtgcgggtaaaacatctatcgcactaagtacgacaatatctagccagctcatatgattagagaagtaccaaccatccctactaacgctgccttgaatattaatatcgatattctcacaacctaaccacagtgctaagcggttacctttacaccaacctcgataagcaccgtgcagaatatcgctaactactttaaatggcagtagtaatttaagcacaccaaaaagcagcacaagcgtgccccaaataattacgttggcaatgcttactagaacgcctgttaaccaatttggtaaaaacttctttaacatatgtgtgctctcgagtacgtcaactacttcgcgtgtgttttaaactctgctagttgctgatttttttcatcccagagacgattaagttcagcttgaaagtttactctaaaatcagcgtcgcctgtataatcaccaattaaattagggctcacttccatgacttcaacctgctttacacgcccactagcaaagtccacaaagctaggtatgccgtctgggtaatgaatagttacattcaccactttagaaatttgctcacccattgcttgcatcacaaacgcaaccccgcccgcttttggctttaataaatgcgtaaatggactattctgacgcgcgtgcttatcagcagtgaaacgcgtaccttcaaagttaacgatacttaccggcatttctttaaatttttcacatgctttacgtgtggttttctaaatcttaccgcgcaatttagggtttttctttaattgtgatttgctagtgcgggtcatgaatggaaaatccagtgcccaccatgcaagacctaagaaaggtacgtatattagctctttcttcaaaaaaaagttcaaaaatgggatgcgacgattaaatacacgctgcatcacaacaatatctacccagctttgatgattagcgataactaaataccagtctttcgcttttagttgctcaagacccgttacgttcagcttatatgaagcaaatagattttgattaatactgttacaactcacccacatagtggcgcattgcttcgctatccagctcatgagcttttgtaacggtttgattggtatgagtttaatcacaccacaaataaagataggcaaaccaaaaaagtgtattaagggtgtaaaataaaaaactgaacacacacaacggatcatggacattactactttttaatcaaaatacgtgtagccagcgaggcctgcatttagttctgataaatattgtgccttagattcattagttaagttttttcagcaaggatgtcgctatcataatcaacaaactttaatacgtccttaacgctgtcacctttaattgcgttggttaactgatagcctgcatctgttaactctacatgcactgagtctgtgtcgccgaacaggttatgtagatcacctaaaatttcttgataagcacccactaagaacatcgcgatgtggtattgctggccttgcttgtactcaggaataggtaaactgctctcaatacctgtaccttcaacatagttacgaatttgaccatcagaatcacaggtaatgtcttgaataatagcgcgttgcgttaacggcttatgtaagttttcaactggcattacaggaaataactgttgaataccccaaacatcaggcagtgactggaataatgagaaattaacaaatagcttgtcagccagtttttcgtttaaatcatctaatacttcacggtgggcacgggcattttcactgagagaagcacgaacacggtgtaagatagtgaagtacaactgctctaacttcgcccactcaatcatagtcagcaaaccgtgaacgtattgatcatgtgcttcactaaataagtgcattgcatcgtgataaatttctagtgccatgcgcggagttaaccgctgtaagcactgccacatttcatcgagcaccaatacactgccagcctcaggcgcagctgggtttgcatgcacgttcaacatcgataacatcagtaagcgtgatgcgcagttaacgcgcggcctgattcagtaataatggctgggtgtttaaggtcatgttgttggcacacttcagcaaacgcattaacgcatcgacactgtaattgaacacgaactacgagaaccagaaccttcgtagtcaacacctaaaccgccacctacatccacgcgtggcaaagtgacgagcacattcacgcaatgcacggtgaatatggctatttgagagccaatatgaaaatgcactaattgcatggagcttattacgcgagctcaacagcagacaacacttgccctgcagttaaaccaaacttacctttttcaccaccggtattttgcctttaccaaccgagtttaagcgaatacgaataccaatcgatggctcaatgcctaagtcatcaatttccgctagtaaagtagttagttcagagagcttctcaacaacaatgtgaaccttgtgacccatacctttacctatacaggctaagcgtaaaactcactgtctttgtagccattacaaacaatagtaattggttctttggctacgcctaaaatcgccataagctcaggttttgagccagcttcaaggccaactaaaccacttgggtgagcaagtaacttgctaacaacagagcgttgctggtttacttttatagggtaaacacaagtatactcgccctgatagtcccgcgcttgacgtgccttggtaaatgcacttgttaaggtgccaacgcgattttgcaagatatcagtaaagcgcactaatacaggcaaagtaagaccttgctttttaaattgttcagtaagcagacaaagatatcgctgactttgtttgatcgccatcaggataagcaaccagctcaccttgtgcgttaatatcaaaatagccgtcactccaatgagcaacattatatgtttcgcgtgctttgtctaaaccccaagtcatggcaatgtcttctgtaatttcaataaatataaacgcacattttaatacgcccgagctgcccacgctaacaaaaaatgcactctatgccaaagtgataaaaaatattcgctatactgattaaaatttgattgagcaattggccaagcactggcagaattgcaccccttttttaccattaaccaaaagtgtataagcaagatggccaatttagatcaaaacaactggtttactgaaattagtgaccgtgatggtagcgccttttcactacgcataactaaaaagcttgatgaacagcaatttcaaaaagtagaaatgtacgagacaactgacttcggtaatcttatgattattgatggttgtacgatggtaagtagccgtgaaaactttttttatcacgaaatgatcagtcatccagcattgcttgcacacccaaaccctaaaaacgttgtgattattggtggtggtgactgcggtactttacgcgaagtattaaaacaccctggtgttgaaagcgtaacacaaatcgatatcgacgaagttgtgacgcaaatgtcacttaagtacttccctgagctatgtgaatcaaaccaagatcctcgcgctacagtgaatgtttgatatgtggtaattgtcgatggtacagatccagttggcccaggcgaaggtttattcaaccatgctttctataccagctgtttaactgcacttcgccctggcggcatcttaattcagcaaagtgaatcaccacttatgcacatgccactattagtagaaatgcgcgacgcaatgaaagaggttggctttgttgacctacaaacactacctttcccacaacctatctacccaagtggtttatggtcagtgacgcttgctcgtaagtcagaagcgtttgcaggttttcgtgaagacgatgcaaatacactcgcgcaaagcacagaatactacaatgcaggtattcaccatggtgcattagcaacaccaaattatatgaaacgtgcttttgagaaaaagtaagcgttttagttagatgtaaaaaagggctcaattgagcccttttttattgtattaaaccttaaaccgattcactaaatgattgagttcattagttagttgagtcatcctagttgccacttcttgggttgaacttgccagcccgcccccttgctgagtttgatcatttaagtcagataagttttgactgatttcatcagcaagcggtttgctcttcggtggcttgtgccgtttgcattgccatcattaacttttacagatgagtcttgcatggcatttaaaatatcattcgtttgcgcgaaagatgctactgcctcgtcagcaaaacgtttacccgagttagcttgcaatgactgctcaacactaccggcaaactgttcaaccattgtttgaatgtcattggtactttcttgggttcgcgtagcgagtgttcgcacttcatcggccactaccgcgaagccgcgaccttgttctcctgcccgagctgcctcaattgccgcattaagtgcaagtaagttagtttgctcggcaatcgcacgaataacctcaagcaccttggcaatattgtctgagctttgctgcaactccgttgagcgctggctggcgtgttccatattttctgacaacgctgtaattttacggctcgaattatcaacggctgttaaaccttgtttagcaagctgctgtgagttatcggcttcatgggatgagttttgcgctattggctacttcacggcttgccacactcatttcatgtacagcttacaatagactcagatgcttgactgagcttttgatttacttgatggttttgattagcgaaattgcctagatcgttaccaagcgtattaagctcttttgcctgttctaaaatatctttaataagctgctgcaaattatctaagaagcggttaaatgcagttgccagttcggcaaattcatcttgggttttaacatttatacggccagttaagtcaccatctcctgaggcaatttcgttaatccgttcagtgacaaagttgatctttgtaagctgacgtggtacaaaataactaaaccaacccgccacagctaaaaccactgcaatcatcaccataagcataactttaaagcccatgatcaatcttttcgtcttgcgacgttttttcagctacttcacccgctttatctaaaacatcacgtagttcagaaaaggtctgttcagttttttttgcgaagcgttagctgggctgttgatataagctgttgaggctttgtaccaagcatcaaaacgcgctatcaaagttacggaattgccctgcaatctctgcataaggtgacatataagataagtattgcttaaaacgatctttcacttgttcagcattctcttgatgctcagtaaggttcaagttgcagtctctgccactttggcttgatacaagtctcgatcagcattaacaaccacagagacagcctttaaaaaacgttctgactgtgcatcaatggcttcttcttgaaggttaattaaataggtatagcccgcaattaggagaattatggcaatacctaataacgcgattggtaacgaacttttgacgcgaatgctttttaacttcatacattgtcctaattcaaaatctaacctacccactctttagaatggtagtagaaaaacgataaaagtgtgaaattaaaattgccatcccgctgaaagttgaaattgctgctgcgagttatgctcattaaatcccataccgggtctattttgagcgtcactgctcagcactgaatattcagcacctacttgccacttgtttgacagttgatagcgcaacttgcggttaaagcttctccacttttggttaggatcattgccaatcatcatgatcacttaccttaaagtatcatacctaattgtaagacggtgctggtctaacttggcttaataaaacaaaatggctgtaaaaatcgttatctatcccacggtattacccattgcggttttgccatctagcataacaataatttttgaacaaccatgccgcacttaaaaagtgtatcccacgcatactgacctgtagggtatttaaagcaccggggtcaccgttattgtcatatataaaacgcgaaactgtgaccttttttgataatcccaatgcatacctaaataatatccaaagcgaccatctacttcttcgaaaggctcaacatagtcagcttgcttatctagctgcgcccattcgaatgaatatggaatagcaaagtcgatttgttcattaaacgtggtttgcctatcatgcatagcgaatcctcgccatgacagcagcgttcctgcagggtcgttacctttaaaaaccgatgcaaagccttcaaaactgtggttacttctaaactgacgacctgggcgtttaatactggcctcaagaccaaaggcacgcacctcttcccctatccacgtattaatcgcagagttagtatagttatagggtgatatccagccactttgcggattctctagtgacatttttggataaaagccacccgctttaaacagcccatttatagcgacttgctgtgagaggctgatactgtaaataggcctgactaaaacctacggttagttcaggatcaggatgagcgttaagcactgtatgcgcagaccaatctcggcttaattcaaaacgactactaagcatagcttgggatatcactaaagcatcatgctcttggtcataacggtacaaaccaattcctctcgctgatagctcaacagttggtcgccacgcacagccgtcacagttaccaagccatcatgctcagcaaatgccagcgcaggtaaccccaaaacactaaccaatgccaaggcttgccagttattcataatcatcaaactcatcgttgtttaattctaattttggtaacaagtttgctttaatttgtagctaaattgactattagaggtgaaattt

SEQ ID NO: 2 - DNA, 912021 bp, unidentified
  source 1..912021: mol_type = genomic DNA
ttaccttcactgaacttggcaagtaattcgttgctaggatggtgcttaatcatggtggtctcccatttcattgcgtaacttctgcaaggctaagcgaagacgggacttcactgtgcctacgggaatatttaaatgctcagcaagttgctcttgcgacatatcttgaaagtaaacgccacgcacgacttcacgttgtgcaagtggtaatttatcaaggtattgtttaatttgtttatcttctaagtggtcactaaattcgtgttgacccggctgggcttcatcaattagaggccaaatatcttcactaatacactcttctttactgctcttcatttttctgagcatgtcgaaagatgcgttacgcatcacggtataaacccatgtcgtcgccgcccctttctctttatggtaaagatgtgctttacgccaaactgaggttaacgtttcttgaactaattccattgcttgtgcttcagagccgaattgctttatcccaaaacgtttaatttttggtgagaaatattggaaaagtattgcaaacgcacgtttatcacggtgcgtagcaacagcaaataatgcatcagcaagctctttgcttggtgtatctggcatggcagagtattgacctgtgttaggtttacaacctgtttgaagttgttgacttaccatctttatgtcatccaattattgtcgtttgtagtaatacgccaaaaagttgatgttagatcacattaatcagtaaattcgttgttaattagagtatggaggaaacttagcaagttttcaaagctagatttataagcaagttgttgttttttaactaacgatataggcaggatctctagccaacgagcagacccaagcaaggttatcaaattgtggagttttatatgacccgctaagtcaggctgatttgcaaacacagcacgaagtgtgtcacttagtaaggtgttttcgtcattaattggcgtgcttacataccacgaaggtgacgtagttatttcgatgtcagcatggcgtagctgctgcttgtcctgactagcgttgtgaatagaaaccgcatgttcagcataaacataattaatagttggccattatcatcttgattgaaatcggttatttgcattaaacaacctatctcgggcaagttaaggtctgtgtcgtgttgggtaagtgcaaagcacaaacctgtattatcttgcacagcttctttgaccattgttaaataacgttgctcaaagattcttagcttggtgaacccttcaggtaaaataaaaaccggtaaaggaaaaatcgcacgcttcataaagtctactattctaaaaccacatgcctttaattacgtgcgctttctatccgccgatcaatatttcatgaaatcttaatatctacttgtactttagaagttgaaccattgcgcaacgttacgaaataattcgattgatgcatatgcactgagtaaactcaaaaccggtgcaaccataagtaaaaataagctgatttcactactcattgtcttgtttccttactgcttgtttgttgctttaggagcttgagcaacttttaactcttcttctttcgaagcaattgcatcttcactcatgtaagtatctagtaacttttgagcatcaaactcaatgctgttcattacgctttgtttcaattcgttacttgcttgttgaacatagcttttaacagattgtgtaattgtgttgctgatatctaattcaaagtcagtagcacttgcttgagttgacgcaaatacaagtaacgcagcagtagttaatttaagtgagttattcatagtggtattccttgtctctttaagtaattagtcgtaattacttaatcaaaggttgtgccaccctgaaaataaattttaaattattgattttaaagaatttaaaaatatatttattttttaacctcattcagggttagttaataataccaaccaatttagatattttgactaatatttagtgaaaaaataagcattgccaacttcagcgtacacttgtacactgaaactgttttaatcactcatttttagtagatagatatgacagaacaactcccctactcacgccaagaagaacaacttaacgtgctcactcacagcatgggagtcctgtttgcggtatatgtgctgtgggatttaatatcacaatctaacgttatatcagctacggtaagtgccatcgtctatggagcaagcctactggtattatttttagcttctactttgtatcacgcaagcaccaaggagcgtatacgggccatttataaaaatgtgaccactgtgctatttacttgcttattgcgggtacttacacgccttatttggttatttcgttatcaggggcatggtcaattgcagctttagtgtttatttggtctttagcacttggcggcgttgcgtataagttactagtcaaaaacaccaataaaaaggtctcactcgctacctatttattaatgggttggtttgcattagcgcttgtttacccactttatttaaaccttgatttaagcgctttatggtggctgctagcaggtgggattgcttacagtttaggcactgtgttttacagtgctaaaactcgccattacagccatgcaatttggcatgtatttgtgctggttggctgtgtttgccactacttatcaattagtttgtatgtttattagtgccactgatgcaagcgcatattaattttggccttgttaaaggtaacgccttcactgagtagtttttgtcgttgctcaagatgtttattgctaccctctggaaacgatattttgccctggctatttactactcgatgccacggaatacgtgaaccttcaggcatcactttcaataaccgccctactaaccttgcgttattaggataacctgcaagctttgcaacttgcccataactggctacttttcccgctggaatggcgcaaataatggtataaattaaatcttctttagttgcctgctgcacgactagactccaaatactgtttgctgacttcgctaaaatcttgccaaatagctctcgcaacagggccatgatggacagagtgctgcctaaaaacacgtatttcagcgccaaactggtgttcacggtcagtaatttttatttgctgcaacaaaccggcttcaatctcagcttggcaatgttgcaaactaatcatcgcccaacccgcaccagacagtaaaaacgactttacactggttatatcgtcaattttcattaatgcagagcccaatgtataagacaacctatcactatcgaaactcaagtcactctcaaacatagccaagcatgggtaattttgaatatcagcaaagctaattttactaggtaccacattaggtgcgctgactataccgatatcaaatttacctataggcaaactttcaagatcccctgttgcatggaacaggtcaaaccaaggcccaatccctaagtccgcttgatgactgtttacttgttcaagggatacaaagcgtttacctgaagaaatactaaactcagtactagcaaaacgttggaaggtttcacttatgacttgattgtaactaggttggtggcaaagttgctcgtagcaaattttataattagcttcatttcctagcgccaactctttagcaagcgagctcagttcactgtttgcgttaagtaactgacgtgcctcacgataaaaaatacggcctttttcagtaagatgtaagcgatactggctacggtctaaaagctcaaaccccagctcagattcgagtttttttatcgccagtgttagtgcaggttgggttttatgaagttttatagcggcttggctcaaactagcactctgtacaattgcatctaaaataacgagttgatttaggttcatgatataaaaaccactatataaataaaattaatgatgtttctaaaatttaataatttttattttatatgtttgcagcgtatcctgcagctaatttatgcatcatatctatggagaagacaatgaaattggcattcgttgcgataactacgagcctaattttgatgcttgcggcatgttctgagcaggcatctaatactgaggttgagccagttgtgcgcccggtaaaattattcactataagtaatctttcagatgaaactatacgtagttttccagctgaagttgttgctaaccaaggttcatatctcgcctttagagtgaatggtgagttacttgagttcccagcgcttgccggtcagcatgttgaaaaaggacagctgcttgccaaactcgaccctgaagactttcaactacaatatgatgagcgcaaagcgcgttttgaactcgcagagtctcaacttgaacgtgtacaaaagctttttgaccgttcaatcgccagtcaatctgagttagaccaagcccttgctaacaagcaagtagcagaatcagcattaaagatagccaaaacgaatttagataacagtgaattacgtgcgccgtttgcaggcactgtagcaaaggtgtttgttaaaaactttgagaacattcaagccaagcagaatattttacgacttgaaacccgtgatttaatggatgttgttattcaagtcccagaaaaactcattgcacgcatcgataaagatgttgaatatcaacctgatgttgtctttgatggctatcctaacaaatcttataaactgtctgtgaaagaatttgatactcaagcagatccaatcaccctaacctataaagtggtattttctttaccggttcctaaagattttaatctacttgaaggtatgactggccgcgttgatattgatttaagcaagatcaccaactcacaatcaccctatacattattacctgtagaagctgttttctctgagccaaccgagcctgaaagtaacaatagttatgtatggatttatgacgaagaaagtggccttgtccataagcaagctgtagaagtaggacagctacatcgtgatagcattgaagtattatcgggtatcaaagcaggacaaaaaatagtcgctgcaggggttaactttttagaagaaggcatgaaagttcgtccttggcaaaaagagcgaggcttataatgagctttgctgcacttgctatcgaaaggaaagtggtaagttggatgtttgcgctgtttttgcttattggcggaacagtggcttactttggcttaggacaacttgaagaccctgaattcacattaaaaaagccatggtgatcaccctgtatccaggtgcgtcgccacaacaggttgaagaagaagttacatttcccatagagaatgcgattcaacaactgccgtatgttgattacgtgaccagtatttcatcaccgggtaaatcgcaaattaccgtcgagatgaaaagcaattatcgtaaacaagacttacgccaaatatgggacgaactgcgtcgtaaaatcaacgaccaagcagcctcaatgccatctggggtttatccgagtaaaattatggatgactttggtgatgtatacggtgtgatgtacgcggtaactggcgatggttactcttacgatgaactgaaagattacgttgattatttaaaacgtgagcttgtgttggttgatggcgttagtaaagtaactgttggtggcgagcaacaagcacaggttatggttgaaatttcaacccgtaaacttgcccagctaggtatttcacccaaccgcatttatcaacttttacaaactcaaaatagtgtgtcgaacgcaggtaaggtgcgcgtcggcgatgagtcaattcgcttacacccaaccggtgaattcaaagacgttaaagagcttgaaaatcttcttatttcaaagccaggtgaaaatgaacttatttatttaggtgatgttgctaaggtatttcgtgaatacgctgaagtaccaaacaatattattcgctataaccaacagcaagcattactggtaggtgtgtcgtttagcacaggcgtaaacgtcgttgatgtaggggcaaatattgatgctcatttagcgtcactcgaataccagcgaccgcatggtatggaaatcaacagcgtttataaccagccagccgaagttgagaagtcagtaagtggctttattatcagcctgcttgaagcggttgccattgtcattattgtacttttagtctttatgggctttaaaagtggcgtattgattggtgtaatacttctgcttaccgtattaggcacctttattttcatgaagttgtttgccatagatttacaacgtatctcattaggcgccctgattattgccttaggtatgctggttgataatgccattgttgtaaccgaaggtatattgataaacctcaagcgcggacaaacaaaactgcaagcagcaactaacatagttgatcaaaccaagtggccgttactcggtgcgacggttatcgctattacggcatttgcgccaattggtttgagttcagatgccagtggtgaatttgctggcagcttgttctgggtgttgtttatttcattattattaagctggatcacagctatcaccctgacgccattttttgctgatttaatgtttaaacaagcaactgcaaaacagccacatcatgatgaagacccttatcaaggtgttatttttaatgtctataaaggcgtgttacatgcggcaatgcgttatcgtaaaaccacattgttaataatggttatcatgctagtgagtgctgtgtttggttttaaatttatcaagcagtcgtttttccctgcatcaaatacacctatgttttatgttgattattggcatacacaaggtgctgatattcataccacaatggatggcgtcgcaaaacttgaaaaattcttacaagcagaccctcttgtagaagaagtaacaacgacagtcggtcaaggtgcccctcgctttatgctgacttacgcacctgaaaaatcatacccagcttatgggcaattgattattcgtgtaaaagaccgtgaagccgtcaccactatgatcaaaaaagtacgtgattaccaacacgagcacgtacttgatgctcagcttaaagttaaacgtatggaaattggcccatcaactgatgcaaaaatcgaagcgcgtttttctggtgctgatcctgtggtacttcgccagttagcaaaagaggcaaaagacattctgcatcaagatgcaggagcatttaacattcgtgacgattggcgagcacgttctaagttaattcgccctcagtttaacgagcaaaaagcccgtcgtttagggattgccaaatctgacctcgatcagctgctgttaaccagcttatcaggtaagcaagtgggtgtttataaagatggcacgcaaatgctgcccattattgcccgctcgcctgcagaagagcgcttaaacgttgaaagcctgcgtgacttacaaatatacagccctgtgttaggtgtgtttgtacccgttacacaagtggttgatgactttgtggttgagtgggaagacagcttgatcatgcgacgtgatcgtaagcgtactatcacagtgatggccgaccacgatgttattggtgatgaaacaccagcaaagctctttgcacgtgttcgcaaagatatagaagccattaaacttcctaatggctatgaactgcaatggggcggcgagtttgagtcgtcaagcaaagcacaaaaagccattttcggttcattgccacttggttatttagccatgttcgcaatcacagtactgctgtttaactctgttaagcaaccattagtaatatgggcgacggtgccgttagcaatcattggtgtatcggcaggtttattactaatgaatgcagcatttagctttatggcactgcttggcttacttagtttaagcggcatgctcatcaaaaacggcattgtattagttgatcaaattaaccttgaactcgatagcgggaaagacccttataaagcagtgtttgactctggtgtaagccgtgttcgccctgtagcgatggctgcgattaccaccattttaggcatgatcccactgctatttgacgtgttcttccagtcaatggcggtaaccattatgtttggccttggttttgccacagtgctgaccctgattgttgtgcctgtgctttataccatgctgtttaagatcaaagtacctaaacagcgtcacgctaattaatacagattgactctcaaccaaaagccctaacagcaaactgttagggctttttctttattagaatgactggtaactaaaaccgccacagcataaaaagctattcaaacactacattttaaaagctcaagcttactttttcaggcttaatgtacctgtgcgtttggtgctgctacgtttcgtttgatttggttttgctgagtgcgaattgccagcctttgctcttgattgaccttgtttggcatcgttgcgtgcttttttcacgtattttgaaaagtcgcgctttttttcttcttcattgcgtggtttttgcttgccgcgggcttgggttggctgtttattttcatcaattgagcgctcttctgttttacctgagtcggcaattgagttattgatctctgccatttcttgctcggttaaatgacgccactgccctacttttaaaccttttagggtaacgttcataatacgtgtgcgtttaagagtcaccacttcataacctaaatattcacacatgcggcgaatttggcggtttaagccttgtgttagcacaatggtaaattgctgtgggccagtttgttttaccttacactttttagtaacagtatcaagaataggaataccatttgccatcttgttaacaaactggcggtttagcggtttatcaactgtcactacgtattctttttcatgattattaccagcacgcaggattttattaacgatgtcgccttcgttggttaaaaaaatcaagccttctgaaggcctatctaagcgtccgattgggaaaatacgctctgggtagttaaccgctttaacaatgttactttgaatttttcgctcagttgtacaagtaataccaacaggtttgttataggcgatataaactcgtttaggttttgcttttaatggctgaccatcaatcagaacgtcatcatcattgctgacttttacgcccatttcaggcaagttgccgttaacagttacacgaccttcttcaatatatttatctgcctcacggcgtgaacaaaaacctgtttcactgataaatttatttaatcgctttaactctgtcatggcatacttctgtctggattttaaagccgctagtttataccagaagcctttgccaagctaggtagaatctaggctctttcgcagcacttttagtgcagcgctgcatttttaggcttttcactcaataaattatgcagggtatcaaaatcgaacgcgtactcgctacttttagtgttttgcagtaaaaaggtttcaaaggggataaccgaccagtctttaatatttctaagccagccataactttttatgttgtgctgtgtaatgaccccaagttgaaacttaatcgcattatggttttgccaataaggattaccatttttatgatcgactaagcttattaatgcccacgcacccatcataaaatgcccgccaacactggccgtgagtttttgctgttcaatcaagtctaaattttcatcaagccaatctataccaccaataaaataggctttctctgctttttcttttactgcttcaagtgcaccttgtgccattaaatcagaagcgcaccaaattacattagtatctggatatcgttgtaataaacgacttactttatgcactgcctcttgcttgttccagttggcataaacaacttgctcaagctcgacatcttgtttacgtaagtaatgaacaaggccatcactgcgggtatctgattcggagccataatgaccattaatcgcaacaaaatgcggcgtttgctttgcagctattgcctcattaagtaaagctttgccaagttgctctcccgctttaaagttatcgtgaaaaacctctcctaaccagtatttaaagcgctggcgaggcttaccaacttcatctcgctcaacgccgacaatggtttcttccagtgttataaagttaactttgtgctgctcaagtagagtcattgactgctcagcaccaccagggtaattgatcaagatagcgtaatctggcttggggttatattgtaggtactgttttaattcagctaattgaatatgacgattaccgccgccgtaaatggtcgtgagattgacattattttgctcggcagccacgtgcatgatatcactcactttttgccaaaatatgtcggttttaactgatggattaacgagcaacacagaaaactgatcgcctgcataaagtggtgaacagcaaagcaatgttaaaactaaccagcaagtgcgcataaccactccgttttgttttcttttattgtagtatacgagacattatctcgacaattttcgccaaattaattcacacggaccatgtttaaagtactggctatagactttacaaaataccaattgaaaaacaagcacacccgcaataaccaaccaataatctattcgatcgaaattaagtgcagcgcttgagaatgcaactttaaaaaacagtataaatattactgtttgcatcagatataaagtcaatgacatgcgtccagcctgctgtaacagcaaccatttactggatttatttttaactatttttacaatgatatggcaatagcaaatggccatagctaaagctgctagccaatttataggctcgacaatcgcgtacataaatacactactgttagggtctatcatcaaccttacgagtgttaaaccaatagccgctggaacaatcatgttaagctgagctttcgttaagccgtcaacaaaaaccccttgtttatatagataaacgcccactagcattagccctgcggccatccacatagtgatcagcggcactgcaataagcatcacagtaaacattaatatgttactgacaaatccagcaaagtaggaagaataagccgcatcataagccatcaaaaacgcgtctgaacttcgcgttaaaggcgttaattcaggttcgacaaaggcaagtaaaaatgaaataaaggcaccgagaagtaaaaacaacatgcccatacgcagtattttttcgttatcttgctggctaaatttaagggttaaccaaccagcacaggcataaataaacaaaatatcgccggcccaaagcaaaaagccgtgagcaaggccaatataagcaagcacttttaagcgattgtgttgtttatctatactttgccaaagctgccattgaataaccaatgaggcaccaaataataggcaaaaaaggcttctaaaacgtccatcaataaatagcacattaatgatgtttatgacagtatcagaaagtggtggcgatgagcttggggtataatcatactcaaacatagcaaaggtatagatgttcataaacatcaaacctagcaccgcaataccccgtaaaacatccatatttatattgcgcatagttcccttataagttttgtctacagctatcgctccaatttaccgcattttcgtatattttgggaagttccccactctcaatatttaaataggcaactgcttgctccagtgcccaccagcttcctgtttcgtatgctttaacagtttcgagaatgtaatagagaatattcttttcttgcattaatgctgcatgtatttcgtcaggaaacggcaatctatccaacagcttttccatcggctgatctaatattgcatcgagtaatgaaaacagccccgttaaaaatgcctctccggtttgttgttttgcgacacgctgcgctattaattcacaaaaacgcgctctgacaacacaaagccgagtaagctcggctggttttgattgggcgctatgggcggtgatgatcaaactaacaaactttttcagtcgttcatgacctaggtacacaagcgcttgctttaatgaacctattttactttttattggaaatacaccactgtttattaagcgtaatagcttgtaggcaagtgcagtatctaaagaaaacagtcccgcgatttcgctaatattaggatcagggcgcattacttcagcataaatcgacaaaactaatgcatagttgtaatcgatatcgcgatgttggatcatttttggttttgcaaaaaagtaaccttggaaaaaatcgaaacccattttgtaggctttctcataatcatcggcagtttcaagcttttctgctaatagttttatttttttatgctttttcagcttctgtaaaacaggcgcaatgtcctcaaagggggtttgcttcacatcgaacttaatcaagcgaattaactttaaaaagcggtcccattcaggttggtatacgaaatcatcaagagcaagtttgtagttattatggaaaagctcccgacaaaattcatagttttcgtctgttggctccatcgtttcgagaagctcaataaccacgtcttgagttggcaaaaacgcgcataggtccagtttcaacgattctggacctatattaattaacgcctttttgcccgacgtaatatggcgagtgcctagattgagctggttttccataatcagacgcgcagtagctgtgctctctgaaacatccgggaaactgttttttaaactatctctaaatagtagctcataggcgacaacttgttgacgacgattaaagaccgcttgcctagcaacaaatacagccactttacctacttttgaatttttatatcacactaagtaattaatagctgaaatagacaaaaaagtcacttaattaccatgaatcacgcaatatttattgatataagcctgataaatagccatctgcaacagatccccatgtaaaacgagcatttttagcttgttcacatatcgagcgccattgctcaggttgcgactttttaaggtctagcgcatcactaaaaccagtaataagttcgtagctttgagaggctaaactctcacctctaaaactaaaaccactgacattatgctcgaccgtatcctgtaaaccgccaacaccatgaactaagcatggctgtccagcgcgcattgctaacatttgacttattccacatggctcaaatgagcttggcattaagaataaatcacccaagtgatacatatattcaccaaccaagtgtgcatagccttttaaaaatagcagattctcttggcgtgccatgacagttgtcatgatttgctcaagttcagcatcaccagagccaagaattatcatgtagccatcatgttgctttaagcgttgacataactcatctaaaaccaatgctttttcataaggttgacgcagtaaaagtgccttttgatctgttaatcgaccaacactcgtaacaagcggacccgcaaaaggttttgttttgaactgtaataaacgttggtgagcaagataataacttgaatctaagatggggctcttcgccatccattgaaatagtgccgactctgcatgatggtaaagtgttgcaaggctgatatctttgagttccattcctggatattcacaaccatttaggatccctaccacacgaccttcacgataggctgcctgcaaatcagcttctagtccttctccaccaaaaaaaccatttgcagcatcactcggacgcaatacttcttgacagtaggtcggtgaaacaaggtgcactttatcaactaaattaatcgctgctcgcatcggattaaaacaatcgtgataacgcggatcgcacaatttctcgccgttataatttaagcccggaaaccatgcttctaaacttgagctatcgcctttaaatgggcgaataccctgcaatgccaaattatgaacggtataagctaaaaataacttagataatgtacggtaacgaccgtcattttttagtaataatgccacacaggcgctatgccagtcatgtaaatgcattacatcagggattcggataattccttgtagtaaggcttcacacaccgccgcattaaacaatgcaaacttactcgcatcggttgcaaagggcctgccaggttcatcattacaatacacggcaccattatggcgactgaattcccaatgagaaataatcagttgcgtaacaccgtgttcactattggcaagtttccacacgtctagttgctgcatatgccctgcaaatggaacatgtacaacaccgatatgatgacgttcaagataatgaaatccgtaatcagggatcacaacatcaacagtaaggcctttatcaactaacgctttaggacagtccctaacaacatccgctacaccaccgactttagcattcggtaatgcgtcattctctgcagccaccatcaacacatgcatgattagcagtactccataacattaattcttactatgaaacaaggagtagcaattgctactccttactacactatgactttaccattaaacaaagtatttattactttgcttttgttgcctttgcttttttctcaagctcattcaacatgtctcgggtaacaagtacgatcccctttttcgacactctaaagccattttctttatcagcttcattatcaaaaccaatttcaaggccagcagggatctcacagttacggtctataatagcacgcctaatgcggcaattacggttaattttaaccccaggtaagatcactgactcttcgatttcacagtatgaatgaacatatacattcgaaaacagcagtgattttctaaccattgaaccagagataatacagccacccgataccgttgaatccacagccataccacgtctatcatcatcattaaaaatgaatttagcaggtggtaattgctcttgatatgtccaaatcggccatttaggatcgtataagtcaagctgaggctctggcataacaagctccatattggcttcccaaaacgaatccagggtacctacatcacgccagtatggctggccttcattttcatctctaaatgggtatgcaaatacattgtgctcttcaatgatggccgggataatatcgtgaccaaagtcacgaccagaaccctctgtttctgcatctttttttaactgttcaaataagaactctgtgttaaaaatgtagttacccattgacgctaaacaagtacctggtttacccggcactgaagttggctcagatggtttctcatcaaaacggcgaactctgttattctcatcaacagtcattacaccaaaggtacctgcggcttcttcacacggtacttcgatacagcacactgtcatatctgcaccagtttcaacatgcttagcaagtaaaccgccgtaatccatgcagtaaacgtggtcacctgaaagaatcatcacgtatttaggcagctcatgacgaatgatatccatattttggaaaacggcgtctgccgtaccacaataccaatcatcacctttacgttgtgatgccggcagtatttctaccgactcaccgagttctttcttaaagtgtccccacgcacggtttacatggcggattaatgagtgtgacttgtattgagttgctataccaacacgacgaatgcctgagttaatacagtttgatagaggaaaatcgattattcgatgtttcccgccaaaatacactgctggcttagcacgccagtctgttaattcatgtaaacgagaaccacgcccacctgctaaaatgagtgcatacgtttctcttgttaaactacttatgtatcgatttgcataactaggcataactctctccgtcttaagttagctgcttttcttctgtgtgttttgctttgcgctaatgtctaacagtggttccaagtgccagatgtcatcactgtattgactaattgttctatcgctcgaaaacatgccactagccgccgtatttaaaatactcatttgcgtccagtgagcagtgtctaggtaagctttttcaacttgctcttgtgcctcaacgaagctggcaaaatcatgggcaactaaccacggatcgtgcgggctcttaatcgcagcaataatgtcgtcgaatagatttggttcaaacaagttaaagtgaccgctttcaagtaactgcattaccttgtataggctgtcggtttgatgaataatttgctcaggattatagtgcgctttgatatcatcaatttgttctgctcgagcaccaaacaagaagaaattatcagcacctactgcgtcacggatctcgatattggcaccatctaacgtaccaatggtcaaagcaccattcatcatgaacttcatgttaccggtacccgatgcttctttacctgctgttgaaatttgctcagacaaatccgttgctgggcaaatagtttccattgctgtcacgttataattcggtaaaaaagccactctcaagtacggttttgccaatggatctttattgatcacttcagcaacattattaattaacttaattatcttcttcgccatgtagtaaccaggtgcggctttaccacctaataacacacaacgagggacaatatttgaagtatcaccttggcgaatacgatcatataagtgaataacatgtaatatatttaataattggcgcttgtattcatgaatacgttttacttgcacatcaaacatcattgatggatcaaactcaacgccacaacgagccttaacaagttcaacaaggcgttgcttattgctatgtttaactgcttgccattctttgtggaatttagtgtcgtcgtataagcgacgtaattgactgactttactgaagtcacctacccactcttcacctatgtgcttattgagtagtttggctaaatcagggttacaatgtgcaagccaacgacgtggcgtaaccccattggtcttattattgaatttttctggccaaagctgataaaactcattgaataagcccgctttaagtagctcggtatgaagtgcagcaacgccatttactgagtaactaccaacaattgctaaatacgccatgcggatttgtggctctgggccttcttcaataagcgataatgctcgttgtttttcaacatctccaggccatgcttgagcaacatctgctaagaagcgggcattgatttcatagattatttctaagatacgcggtaataatcgcgcaaataatgatactgaccacttctctaatgcttctggcagtaaagtgtggttagtataagccatggttttagtagtaatagaccaggcttcttgccaatctagctcatactcatcaaccaaaatacgcatcagttctgctacagcaatacttgggtgtgtatcgtttaattgaaaaacatggtaatcagcaaagtcagagaaatcttcgccatgtttgctaacccacgtatctatgatgtcttgtaagctcgccgatgataagaagtattgctggcgtaaacgaagctctttaccattttcactgctatcatttggataaagtaccatggtgatttgttcagcaaggtttttacgagcaacagcttctgaataactccctgcgttgaattcgctcaaatcaaattcgtcagtcgcctctgatttccataaacgtagcgtgtttacgatatcgtttttatagcctggaattggcacatcataaggcacagctaagacatcgtgagaatcaagccattgacggtgctcacgtccgtatttatcagtataactttcaacatgaccaaagaattttacacgctttgattgctctggggcacttagctcccaaggatgaccttcgcgtaaccagttatcgggctgttcaatttgatggccattttcaatcgcttgattaaacatgccatattcataacgaataccataaccaatcacaggtagtgccaagcttgcacaactatccaagaaacacgcagctagacggcccaaaccaccgttacctaaacctgcgtcgtgctcagcttctgcaactgtctctaactttgtacagtaatcttgtaatgcttttgcaacttgatcgtctaaatctaggtttagaatggcattaccaagagcacgacccattaaaaattcaagagataaataagcagttttacgacgcttttgtccgtgaatttgctgattagttacacggcaacgtgcaaccaatctgtcacgaatagttaatgctaaagcatgatataaatataattgcgattcaccgactttgtcacgcccaagggtgtaataaaaatggcgagataaatcatcatctaaggtgctttcatcaacggtaggggcatcctgccagcccttaacaacacatacttgatcggcatttttagccatgattaggatcctctgaattggcggtaaaaacccagctgctcattgcagcaatctgttgttccttatcaacatcataagttgacataggatgtatacttgtcagtgctaaatgccacttccctttcgcaagagggggtaattgacaagtaacagactctgacccagcatttaaaatgatcaataaagcttggtttgtgtgtttatcagtcaggctataaatcaacacttggcgatcaacttgatgccaatcgtcttgttccattgcagtgcctgattcagtgaaccacgcgacgtcgtaacgtggatcattatcatgaacaaaaaaacgatgcttaaagacactaaactgctttcgtaaacgcaaaacatcatcgatgaatcgggttaatggatgattaatttgcgagtctttccatgcaagccagctagtgcgattattttggcaatacgcgttattattaccaccttgtgaatgggccatttcgcttcctagtgaaagcattggaaccccttttgaaagtaataacgtcaatagaatatttttttgttgctgcaaacgtaatgcgttaatttctttatcgtcagtaaaaccttctacaccacaattaaaggagtggttggcactgtgtccatctctattttgttcaccgttggcttcattatgtttctgttcataactcactaaatcattaagcgtgaaaccatcatggctcgtcacaaaattaatgctgttaagtggtcctctgagattatgctcaaataagtcgaacgaaccatgtaaacgctttgcaagctcacctataaccccctgctcttgtcgccaaaaacgtcggatagtgtcacgatacttgtcgttccactcacgccaaggtgcaggaaaagcccctaattggtaaccgcccgggccaatatcccatggctcagcaatcagttttactttactcaaaacaggatcttggttgattgcttggaaaaacgcatgcgcttgattaaagccattaggattacgagcaagaatcgttgcaaggtcgaaacgaaaaccgtctacccccattacttcaacccaatatcgcaagctatcaagcaccagctgtaaggttcttggtgaatcaatattcacagtattaccacagccggtatcattgatataatgctgaggtttatcagccacagtgcgataatagccaaggttatctaagccgcgtaaagaaagaataggcccatcagttcctgcttcagcagtatggttatagacaacatctaaaattacttcgatatcagccttatgaagagccgcaaccatttgctgaaattcgccgatatcatcattcactagataatctttgtgcggcgtgaagaaattaagcgtgttgtaaccccaatagttttgtaggcctttagccgttaagaactgctcacttatgaatgcgtgcacagggagtaattcaagacaagtcacccctatagtgcgtaaatgctctataaaactcggatggcttaagcctaagaacttaccttgtagtgctttagggatcattgggtgtcgacatgttgcgccagtaacatggcactcataaatcaccgttttaccccaactatggttaggttttttacccgtataaggtgcaagctcgcgaactcgagacttgggcatatcaacagcgttattgacttgactcaacttacctacaggcatctgaccataatggcgctcactccaagtaaactcaccatgcaagtctcgcgcataagggtctagtagtagcttgtgattattaaagaaaagccctttttctggtgcatattcaccatctgccctgtaaccatacaatgcccctgcttttaaagggctaacgtgcaatgtccaaatgccaccttcgttaaggtgcattgaaagagtcattacttctgaatgaccgctattgtcaaataaacacaatgacacatgctgagcttggggtgcatacacagcaaaattaacaccgttttcaacaatagatgcccctagaggcatcgttgaaccgatttgaagctctacactatgactcatcgttcaccttcttcaggtaaatagttgcaagcccaggtaaagacacgcttatactttgattgtaaccatgactcgcagtaggctgactaaagataagttgttctgtattaccgctaacttcaacacctgaaccaaagtattcttcattgtcagaattaaagataacttgataacgacctggcttaggaacgcctattacatagtcatgataaacttgcggtgttaagttactaattaccagaacaaaatcgtcagcatgcttggcataacggatgaaactaaacatgctttgctctgcattagaactatctaaccatgcaaagcccgctgggctagtatcttgctcatagagtgcaggagtcgtggtataaatattattcagttgtttaattgtttgttgcataccactatgactaacatgctcaagcaagtgccagtcaattgattgatcatgattccattcactacgctgagcaatttcagctcccataaataacagctttttacctggatgagcccacataaatgcgtagtatgctcgtaaattagcaaacttctgccaatcatcacctggcattttctctatcaatgagcctttaccatgcacaacttcgtcgtgacttaatggtaaaatgtagttctcgctataggcatacaccattgaaaacgtcatttcatgatgatggtgggcacgatataaagaatcacgctgcatataatgcaaactatcgttcatccaacccatattccatttatagccaaagcctaaaccgccatgatcgacctgccgtgtcactcccggccaagcagttgattcttcagctaccatcataatgccaggatttttaccgtaacagcgcagattaacctgctttaaacattctattgcaccaagattttcacgaccgccatactggtttgggatccattgcccttcttctcggctgtaatcgagatacaacattgatgcaaccgcatcaacacgcaaaccatcaatgccaaattcatgcaaccaatacattgcattagctatcaaaaagctgcgaacttcagcacgatcataattgtaaatataggtattccaatcagggtgaaatccctgtcttacatctgcatgctcgtataaatgcgtgccatcaaaacgatgtaaaccatgtggatcacttgggaaatgacccggcacccaatctaaaataataccgagatcagcgtcatggcattgctcaataaaatatacaaaatcctcaaaactgccataacggctagttggggcaaataagcccacaggctgataaccccaagaaccatcaaatggatactcactgataggcattaattgtaaatgcgtaaaaccaagatctttagtgtacggaataaggttatcggcaagctcacgccatgttaaatagcggccctcatcatcgcgtcgctgccaagagcctgcatgcacttcgtaaatactgataggtgcatcgatactgttacgctttgcgcgatttgctaacgcttcatcagacaactgtatcttcttatttagcttttgtaagacagaagcagtacccggcgcttgttgcattttaaatgcaaacggatcggctttatcaagtacttcaccagaaggtgtactaatcgcaaacttatagcactgatgctcttttaaacctgggataaataattcccaaacgccactggctgggtgaaagcgcataaaatgacggttgcgctgccaataattaaattcgccaataactgaaacgctactcgcgttaggtgcccaaacagtaaatcgcacaccttcaacaccttgctgagttacaaagtgcgcaccaaagtgctgataagcgtgttcaagactaccttcgttaaataagtacatagcttgttcatcaagtgtacttgtaaaacgatactcatcttcttgaagatactgactgccatccccataattcacatccagttggtaatcagggattgattttgctttgacagttgcaataaataaatcgctgtcaccttgctttttggcctcaataacctgcttgccttgcaaaattgacaactggcttgccccaggtaaaaaacagcgaatctcaaagcttgatgcactaactttatggggccctaaaaaactgaaaggatctttataacaacctgaagacaatgcatcgatatgtgcttgataaaccatgggttcagcaaaaggcttttgaccaacacgactgctcatttattgattccttatcgaaattaaattggctaaaaatgcatgctgagcacgaataatttgctcagttgggcgtgaaagaacgcgccgccaatttgggtattctttatcagttccgggaatgttcaccggcaaaatttgctgatctaaatcgtcaatttgaatggtaaataatctggctggagcagctgctaacgatgaggctaataactcatacaccacagacgcttcagaatctaatgataagtgctgccctgattctcttgcgataaaattaagcatacgatgcttttcgacatttctcgcttcatgttgcgcagcgctttgtgcactatcaagcaaaccatactcttgcttaacagtaatatcgtgaccagtccaccaccctttaaatggcggtacatcatgattagcaatcatcaacaaactatgcggtgcaaagtgctctgatgctaaaaattcaccttgataatctttttcaaaatagaacaagccatttgaataaattgcacttgcttttagtgcttcgcgaacctcacttggtacaacacctagatcctcacctatcacgacacagtgattaagatgggattctattttcagtatcgccaacaaatgttcaaatgggtagtaaacataacatccatcttgctgggcgttattttcaaaacaccaccacagccttctgattgccatcacatgatctatgcgcaatccaccaacatcttccatattggcgcggatcaaagagcgatagaaggcaaaattatttttacttaacttttgaggatttaaagctggcaacccccaattctgaccttgttcagcccaaggatcaggaggcgctcccacatttgcccccactgcaaataactcttcttggctacgaaactcactgccatcaccagcgcaaccaacagctagatcgttaataagacctatcgccatatttgcttcatttgcaatatgctgacaatgatttagctgtaaatgtgcctgccactgcaagtaactggcatattcattatcttcaactaccaaggttgctagactgtgcttatgattactacaaaactgcttaaactctgcttttcgttcagctgacgctgtccggcaaaattgagtgtataaacaacgaaatgcatcatatttaaatcgactaacagcagaataatctataaaaggttcagttgtagcgggtttatcactgagcaattgtgatagtgagtcattattcaatgcatcttcacacagtgaaatcgaaatatatagcgggtttaacaacgctcggctgttagggctataagggctagctcgctcaggactgtgttcaaataataaatgcaatggattaagtaaaatgtaatcaatttcttgttgcgccacttcacggattaaagttgctaaatcagcaaaatcgccaatacctaatccttgcgcattacacaaactgtaaagttggatggaaagtcccaaacgctttttatcatcaattgagtaacactctttaggtgttatccataattggctatgagcttgttgatcagcaaccgttatcactgcatcatgataaccaataggcatagcaggaacaggtaaagcgacttcaaggtaacgaaccccattaaagccatagtctcctgtcacggcaagtccttgcagattttcacgtgtcagatttaaggacaaggatggtatgctaaggtgacaagctcggctcaacaagcgttcatcgatacgaacttttaagtaagggtcatgtgcctcaataatgctagtttgaggcaacaaagtcagccacgttcctgcatctaaaacaaaatttaactgatttatttgatcagaattagctgtgtctataccacaacagcttagtgcctggcggcgtgtattttcttcgaaaataacatgctcgccagtatacttcgtatattcatagcctatgccatgcagataatataactgcgaaagtgactgcatcaactcacctaaacgcgttgggtattaacaatactattatctgttccaaattcatttggaatatagccatcagcctggtggtcgttatcccactcttgaccattaattagataacgaaaatgaaattctttatcaagtggtaggcgttgtttacatttaaacacttgttcttttttattgaatttcattggcactggttgccaatctgtaaattctgcaactaactgcacgtcatctgcatcgggacgcttaaactcaaaggtaacttctgtttcgtctttagtcttaaaaaaacgtttacttaacatagtgggctccaatcaaccaattggtaaatttatccttgtcacagtaccgcttttaacaacttactgcgcgaaactgtgcgtttaaggtttatttatctagatacttatgaaaataagtgaacttagtaaatcaaacctatgtttacgcattatgacagtgcatcagcttattttttgcaccaaaaaagagcaaaaaacaaactatcttaacacccatcatcttgctaacttgttatgagcaataactgaaccaagttggctataaaatatagtttaatttcaatatgttttttaggtgttgcttttaaagcattgtaaaagtagttaacttgcggactttggtaaagtgaataaatttgaagcttatttagagtaaaaacactaaatacaacatcacacttaatacaacaagaataaatacaacaaactgcatgagtagttaatttctaaaataaaaacacacattcaacagcaacgaaaacttaacctttatttttacttatatttttaggttaaataaacacaataaaaacagcatcaccttattatattgcaaacaaatatatagaataaaaagaccactatataagctgacgatacaatttacattttttaaaaaatatctcagcaataaaacgaagacaataagtagaaaagcgtaaattttagacttacatgcagtcccttttgaaaagcactttccaaatctatgcaacaagctaatgatttttccctacagtttaaaaccagttctctcactaatctgtaaacacttgaaaccttaaaaaccaccaaaaacgcaacttttatacaaaaacaaccacaaagagaaaattatcatacatattgttattataaataaattgatcatgcacaaagaaatcatcacctcaaatgcgctaaactagaatatctgctcgataatacgcttactctgctgcgacacaattcagcaattagcaacaatagaagaattatttgagaaggaaaaagttagagcaaatatactaaacaatgtgaaatttcacatttacttacacccattgttccattagacaagaaaggctttgttaattaaatttacaagcaatatactcaaggcattaagctggtgagttttatagtaaaacattaacaccaaaacggtagtaatctatgaccaaatcttttcgtataacgtgcataaccataataaccgtaatggctttttgttatggctgtaacatactgttaaccaagcaagttaatgatatacaattcaatattaatactgcagaattgagaacatttgagcgagcgttgttaaatgttgagccatcgccttggtacaatgtgatactatatggtcagaaaacgtttctcgctgatgactctcaatttgtcgtaattcaagcaaccccagttgcaattaatgcaattgaggcgaataaacttatcaaactaacacttttatcacctgttaatattattgtttttcttctgcttgcattagcaataagcctggtagttacaagaaaaaagcaatcaagtagtgaaaagtatttgttaaaggagctaaataagcaaacgacagagctattagaaaacttaaatgttgtccatgtgccatctgagcctacagttaaacctattattcaacttaaaaaaaatgttcaagcacttagctcgcatataacgacctatacgagagaatctgaagtgagtattcatcaagacaaactcaccttattactcgaccgccatgcttatattgaatacctcgcagaacaattacaaatagccgaaaataacaaactcagatgttctttattattcatagatttagatggctttaagcaagttaatgactcatttgggcacagctttggggatgaagtgctcattcaagttgcagcccgtttaagcagtgtattacgtcatcataaattaataaatttgtctcctaaaagtcagcttgaacaaaacttagctcgtttaggtggtgatgagttttcaatatttataagccaacaactagatcaacaaaaaacagttgaagttgctcaaaatgtgttgagagagattgaacgtgattttgttcttggtaataagttaataaaaattagtgcaagtattggtattgccgtttaccctgatagtgcggctacaccgcaatctttattacagatggccgatgttgctatgtaccgcgctaaaacagatgggcgcggtattttcaaagtttattcacctgaaatgggtaaaaagatccgccgttaccactatttacttgaagaaatgcgtttagcaatcgcaagtgaaagctttcatttgtcttttcaacccatcgtacatgttgaggattgcgcgatagattactttgaagcgctgatccgttgggatcatccagctgagggctctattgctcctgacgaatttataccaatcgctgaagaatcaaacctaatcttagatttgggtgattggataatgcttgaatcgtgtcgacaaatgtcagcatggcataacgcaggcttaaagaaggttaaaatttcagtaaatatctctggtgtgcaattaaagcatcttgatatttataaattcatcacagaaaaactagctaaaacaggtctaccagcaacagcactgatgcttgaaatcacagagtctacgctgataaaagctagtaataaaatcattcattctctagagcgcttgcgtgaagaaggcgtcactattgcaattgacgattttggtacaggatttagctcattgagtacattggctgaattaccaattgatgttattaaactcgatagaatgtttgtctcacaggctgatcaaaatcctaaatataaccagatattacatacgttgagtgaattagggcaaaaacttggattaaaaattgttgctgaaggtgttgaagatcacagccagtttgagcttgtcaaatcgctgggcataagaagtgtgcaaggctatttagttagccaccctgaatcatccgtttatgtaggccataaagttttacaagacaacttaaactttatgtctgtaacaggcactggtgtttggaatatacagtaattatcgttatgactataatagcgtgtacttttccaaatatgtgccttaaatgttaaaaaaaagcctattatctatattactgttttccatcacgttgatgggaatttttgtagcctcttcaatttacacgctttacagtaaaaagcgtttaactgttgaccctaaagtgaaagaaatttcaggaattgaatttgataaatataaacggctatgggctattaacgacagtggtgaccaaccgaagctctatcggctcaataaagatggctctattgctaaagaaatcttagtgacaaatgccaaaaacattgattgggaagatatgacacaaaataaatttggtcatttttttttaggcgacttcggcaataataacaatgatagaaagtggttaaccatttataaaatcgaaaaccctattgatatcaaaggcgacaccactgaagccgaaattatcaagttcacctatccagaaatggatggtaaccccattactccagatcaaagaaactttgatttggaagcgtttgtagctctcggtcgtcacctctatttattcactaaaaacagaacagaaccatttgatggtatcaccaaagtatataaagtaggcgatcatgccgctaattttgatgcagagctaattgactcatttaaaacctgcaccaccatggaaaaactctgttggatcacttctgcagcacttagcccagaccgctccaagttagtactgttagattcaactagcatctggctatttgagaattttcaaggtgataagtttttctctggcgacgtttcgcttatagatttaggtatcgtgacccaaaaagaagcgattactttttatgatgacaatacgattgttttcactgatgaagaatttaaaggtattggtggcaacgcttatgtgattgaacttgataaggttgagaaaaaagtcatccgaaaagcgcctaaacctaatcactaagggctacttactttatttgaaagtgccttttcaatatcgattcccaaaatcagcacaccaatgtgctgattttcatcatccaatatgggtacactaaactgcacctgaaagtgcttagtcgactcatcaaactcaaccgtgtcaatgtagtagtcatcatcttgcaaatacatatttaaaaacttagcttcatcaccctgccaataatcggttgtgacttcactgattatgacattcttgccttgtttatcggtgacgattatttctgtaattaggccttgcatttgcttttgccacacttgtaagaattgtgaaccctcaagtttgagaaagcgctctgcaagtattggtttattgtcaataacttgcttagcccactgctgatcaatctgctctaactgtttgatttcaattggctcttcattactttttattaccgcttgttgcacctgttctgagcttgctaaatgctgtattttttctaggagcactttcactaatgttagtttttcaatttttgacaatatgaaggggttttgtgaacagctacttatgtagctattaaatatgtttaaaaactcaggaaactccttgagcgttttatttgccgcaaataagccaagtggaacatagcggtaaaatgcctgcgcgtactcgtcaggttttatttgcagttgcacagcgttgtattcaaattcttctaaatcaagcaaaattctgtctatacgctgctttttaaatactttcagtagttcatgtgtggtgttaacttctacttcaatatttttattgcttagttgataccagtcagcctgatggcttcccctaacaaccccataacgaaggtcttcttcagcgatcgtcgctgaatctgcatgggtaaaccagtaccaattttctaaatacataggtgcagaaagttcaccatactcttgcatttgcgataacaggtttgcggtaaagtaaccatcgagccgatttaactgcacttccctttttgctctgagccaaggtagcttatgtaacttaaatggcacattgatttgcttaaatatacattcaacatgacttattgcattatgaggtacgttaattggcagattcgttcctatctgaagcggttgagccacagtgagagaaagcaaaaaagaagcaagcattaatatcagcctaaacaactaataaattaattttattatagacaataagcgcatttttacttgctaaacaattaacgcttaaattttgtctctaaaatcaccgacgaggtcgtacgctcaacaccatctaagttaccaatgtcatctaaaaggtggctcagcttttcaaggttttgggcttgtacaacagcaatcaaatcaaattcaccgctaattgcatagagctgtgaaatagcatctatctgctttagctctatgttagttttagtggtgagtttctgtttaaccttgattgaaacatgcgctgacaccatttggttcaagtaggcatctccataatcaacgctgtagccttttattacacctgactcttctagttttaacatacgactttgtactgttgagcgagagagattaagcgctctagctaagtctgaaatactagcgcgggcattagttcttaagatagataagagcttttcatcttgaggagttatcactttgttcactttcatcgttaatttgctttttattttagtcatttttcacaaaatagcactgcaaatttaagttcctaaccaagataataagaaaaatagataagaaaaataatctcatcgtgcttaattaggcaggaacggcttaactgatctaattttcgcaatatacttttttcatactaagccagatttaggtgcaacaaatgcaagtaacaagagaactttttaacgacgtaatggtaccaaactacaacccatcagaagtgatccctgtaaaaggtcaaggctcgcgtgtttgggatcaagacggtaaagaatttatcgattttgcaggtggtattgccgttaactgtttaggtcattgtcatccagctcttgtcaatgccctaaaagagcaaggcgaaaaaatttggcacttatcaaacgtaatgaccaatgagcctgcactgcgcttagctaaaaaattaacagacgcaacgtttgcagataaagtgtactttgcaaactcaggcgcagaggctaacgaagcagcattaaaattagcgcgtcgctgggcattagatgtacacggcgagcaaaaaaatcaaatcatcgcgttcaacaagggcttccacggtcgtacattctttaccgttaccgtaggtggtcaagccgcttactcagatggttttggtcctaagccagctgcaatcgatcactgtgattataacgatttagcagcttttgaagcacttatcagtgacaatacatgtgcagtgatgatggaacctctgcaaggtgaaggcggtattatttcacctacaagcgagtttatcgaaggtgtacgtgcattatgtgataaacacaatgctttacttatttttgatgaagtacaaacaggtgttggtcgtacaggcgatttatacgcataccaaggtactaatgtaactccagatattcttacaacagctaaagcattaggcggtggcttcccaattggtgcgatgatcacaacagctagtattgcagagcatctaaaagttggtacacatggctctacttacggtggtaacccacttgcatgtgctgtagcagaagctgcttttgataccgtaaatacagcagaagtacttgctggtgtgaaagagcgtgaacagcttttccgtgaaggcttaacggcaatcaacaacaaatatgatgtatttagtgaagttcgtggtaaaggtcttttattaggcgcagcactaaatagtaaatttgaaggccgtgcacgtgatttcttagttgcaagcacaaagcatggcttaatgagccttgttgctggtacaaacgttgtgcgctttacgccatctttagtgatcccacttgaagatatcaaagaaggtttagctcgctttgaaaaagcggttgcagacgttgtaaacggttaattctagttggcgcatgcttttaagtgtgcgccattggagtgcaattaatgcaagtattacgtcctatcacagcaaatgattttgctgcgttgaaacaaattgctatcgagtcaggccatggttttacctcactgccagtcgatgataatttattacaacaaaaaatcgaacgcgcagaacgcagttttgctaaagatataaataaaccacaagacgaaacctacttatttgtactagaagacagcaagaccggtgacgttattggcacaacagctatcgaagccgctgtgggtatgtcggttcctttgtaccattatcacttaggaaaaaccgttcatcactcccctacactaaatgtttataatactgtcgatatcttgagcatgtgtaatgattacaccggttgctctgagatttgtacattgtttttgcgtgagcaaaacagaaaaggcttaactggtcgctttttatcacgttcgcgttttttgtttatggcgcaacatagtgagcgttttgccgataccatcattgcagaaatgcgaggtgtaagtgatgaagacggtcactcacctttttggcaatggctacaagaacacttctttagcattgaatttccacaagctgatcacttagttggcctaggcgataaagtgtttatcagtgagttaatgcctaagtaccctatctatgccaacctgcttagcaaaaaagcacaagctgtcattggtcaggttcatgaaaaaaccaaacctgcactgaaacttttagaaaaagaagggtttgagcatcgtggttacgtcgacctattcgatgcaggaccaactgtagaggcaaaacttggtaatattcgcagtgttcgagagtcacaagtatgccctattactataggtgaacttgatcatatcaatgagaaatgctcagacacactggcaatttgtaatcaaggcgtgaatgactttagagccacttttactaaacatgctcattacaatcacgctaagcacaccttaatcgtcagccaggaagtggcagaagcacttaaattaaaacaaggggatgcagcacggttcttccgtctgtaaccacttaaggagtttaaaatgagtgtaacaactcaacttatagataaccaatggcaagctggccttggtcatgattttagttcaatcaacccaagtaatggcgaggttgtttggcaaggtaaaaccgccaccgctgaacaagtagctgatgcaattaaagcagcccgcaatgcacagcttggctgggctgatatgagccttgaagatcgtattgttattcttgaaaactttgcagccgagcttaaagaaaacagcgaagagtttgcgactattatcgcccgtgaaacaggaaaaccactttgggaaacacgtactgaagtaggtgcaatgacgggtaagattgctatctctattaaggcataccatgagcgcacgggtacgacagaaaaccctatgccgggtgctaaagcatttattcgtcacaagccacatggtgttgttgcggtgtttggcccatacaacttcccaggtcatttaccaaatggccatattgttcctgctattttagcgggtaatacggttgtatttaagccatcagaactaacgcctcatgttgctgagttcaccttaaaactttggctaaaagcaggcttaccagccggtgtcatcaaccttgttcaaggtgaagtagagacaggtattgctcttgcatctcaccaagatattgatggtttattctttacgggtagctcaaatacaggtcacctattacataaacaatttgcaggtcacccaggtaaaattttagcactggaaatgggtggtaataacccactgatcgtaaaagatgtcgcagatgtaagtgccgctgttcacgacattattcagtctggtttcattacgtcaggccaacgttgtacctgttctcgtcgtttatttattgagaactcagcaaatggtgatgcaattttagaaaaattaattgctgcaacaaaaaacatcaaagtggcagacagcttcagcgaagatcaaccatttatgggtgcaatgatcagcgaaaaagcagcactaggtatggttgcagctcagcagcagttacttgatatgggagcgacatctcttgttgagcttaagcatctcgagccgggcacaggttttgtaagcccaggtattattgatgttactgctgtcaaagatatgccagatgaagagcattttggtcctcttatcaaggtatatcgttatacagattttgatagcgcgattaatgaagcaaataacacctcgtttggtttatctgcaggtttattaagtgatgatagcaacgactaccagcatttcttaaaacgtattcgtgccggtatcgttaactggaaccgaccaattacaggcgcatcaagcgctgcaccgtttggtggtattggtgccagtggtaaccacagagcaagcgcgtattatgctgctgactactgtgcataccctgttgcttctgttgaagccgataaagttaacttaccacagacccttgcgccgggcttaattattgaataattgattggcggccttgccgccttaattgaaggaattaaacatgcacacagatgtaaacgccctatttgaaaatctatgggaaaactatttatcagttacgccttcggcagtaaaagtacacgagctactaggctctacacaaaaagatgacgtgattaacgatcacatcgctttacgtacttttaatcacgaaaaaatcggtttagaaaaactagctgcgcactttttagctgttggctacaaagaatgcggcgagtatcatttcgaagcgaaaaaactatacgcaaagcacttcgaacattcagatcctaaacaacctaaagtttttatctctgaattacttgttgagcaatgctcagaagaattacaagctattgtgaacgacatggttgatcagattgacgaaagtgcagtaacagctgataacttcctttactctggaacgcactggcaagtaagttcagacacttacaaaaagctgttagcagaaagcgaatatgcagcgtggatgtcggcgtggggttaccgtgctaatcactttactgtgagcatcaatgaattagcaaaattcgatgatatcgaaagtgttaaccaagcacttaaagatgctgggtttgcattgaatacatcaggcggcgaaatcaaaggttcgcctgaggtattgcttgagcaatcttcaacccttgctgatgacagcgaagtggaattcagcgatggcaaaatggctgtaccaagctgtttttatgagttcgcactacgttatgcaaaaccagatggcgagctttacacaggctttgtagcagcatctgccgacaaaatttttgagagcaccaatgctcgataagtaacggcttgttagctaaaccaataattaaaaaatccccttttttggggatttttttcgtttaataaaatctgtttctctagagtatcaaaaatttaaatcgttataattaattaaaaatcaacaggttaaaaatatatttctgtttttgaaattttttattgcgcaaataaaaaagcagatctattatcacgccgcttcttgatgatagccaatccgagtacattacaaacactgtttgtagcaaggcgatagagcaactatccaagagtgtatttgattgcacagaacatactgtgcgcttaataacactcaactgactcggacttccatttttttccgggcagttgcttaattgccggagagtaaaatggctatttcaacccttacacaagacttaacaatcaaagtacctgcagcgtcggttgctgcaaatgaatcaattgcacaaccatcaaaccaatttattgagcaacttgttgcacaacatggcgcgccattaatggtgctagattgtgaatctgttcgtcatcaataccgtgcattgagccgtgctttacctggcgttgttttacactttgcattaaagccactgcctcatcctgcggttgttcgtgcgcttttagaagaaggtgccagctttgatttagcaaccagcggtgaagtagacttagtcgccagccaaggcgtaccaagtgatcgtactattcacacgcaccctatcaaacgtgatcgtgatatccgtgatgcacttgaatacggttgtaatgtgtttgtggttgataacatcaatgaattagaaaagttcattgcatacaaagaccaggtggagttacttgttcgcttaagttttcgtaatgcggaagcattcgctgatttatcgaaaaaatttggttgtagcccagcaatggccattgagattattagctacgcgcaacaattaggtattcgtatcaaagggctgtcgttccatgttggttcacaaacagcgagtccaactaaatatgtcactgccattgctgcatgtaaccaagtgattaacgatgtagccgcattaggattacctgcgcttagcacgcttgatatcggcggtggtttcccagtgccatatcacaaagacgtgctgccaattgatgaattttgtgcgccgattaatgatgccttagcgcagttaccagagacagttcgcgtaattgctgaaccgggtcgttttattgttgctagtgctgtaaccagtgttgcatcggtaatgggtcaagcggtacgtgatggcaaaccttggtattacttggatgatggtatttacggctcattcagtggtttattgtttgatgaagcctcgtaccctatcgactcgttcaaacaatcaaacgaacgtgttgagtcagtgttagcaggcccaacttgcgatagcatcgacgtagtgagtgagtcaatcatgctaccaaaattaaacaatggtgatttaatcatcagccgtatgatgggtgcttacacattagcaaccgcaacagattttaacttcttcaaacgtgcagaagttatcgtgttgaatgatgtagtacaggttgacgcactcaccggttaatcgtttcctcgactaaaagcatgtaaggcaacatgctttaactcttaaaatgcagctgctcattccagctgcatttttttataccaattcgcttaattaagtcttattgcaggttggtcttaaataaagagtggtttgtaatcgttttctaattgctcaaacgacaagttaccaataaaacggccaaagctcagccatgttgctaggcctcgtaagtctttaaagtgtggcggaataaatttagggtcttcaatcacacctagatcatgcaattgtgatatcagtctaaaatcatcaatcgaaattttaccgaccaataacaagtgcaattgatcaattcgacctaactgaatggcaactcgtataaggttatacaccaacacgaaacctttgatataggcgatatctttggtaaaaggtaagcctgttgctgtactgcctctaaacactcgttgtgtgagtgtatagctgtcgtctttactcaaaccttgcgctacatagtcacgataaatatcaacaaactcagcgccatcaataaccttagtaataccttgaatacggttcactaattttgctaaacgtcgtggcgtcgactttaaggtaataatttcggtcaacaccgcaaggccttcttgggtgacggtagagctcggtgtgcctttacttaaacaggttaaatatggctgagcaagaccgttttgcgtcgtacccacatggatccagccttcatgcacttcaagaatatcaagctcacgctgagagaacttaacatcttgattaagtttaatattatttgcaccagctgcggcatcactgacgataccatcactcagaatgacctcaacatcaatgcctggcatcgtttgagacacttgagctgctagaattttcaccgcgtcttctgcatctatattttttggatcatcaggcaagatatcggcatcaagcatactctttagtggctgctcaagcatagttgcaagctctgaaagtgacggctctccagcatggaataaatctttaggatgaccgaacagctctacagacagatcatgaaattcaggggtaccacgatactcaatcatactaagtacggttttatattcagtacacatcttgctcatgtattgcgcaatcgggtttagttgccctagttggctgatgatatcgcgatttaaatcagaaaacgcacggcgcagttcgcttggtacaaagccaaggtcacgctgttggtaataggcttgatcaactgttgggtttttctggcatttatgcttaaaaaactcttctttgatttgtttatcccagttgatcgcatcaaggatacgaatgggtgtttgcagtgcgattaatcggtcagataactcgcgtgtttttgctaataatgccttatctatcatgctctaggctcactgtgtaatgagccttgagcataggctaaatttgcataattacaaagcaaaatcacacggtttttattaaaatttagcctgtgttgagactatttttccatcgttgtaaagaagtaaactgggtaccgaattaatgccattttcgataaataactcatttccataatcgattgaaactggcatggttacagagaatttatcaatatattcttgcactgcactttgatctgtccataactgactcactttaacctcgacatctattccttgctttgccaactgattaacatgttgctgcgctaattcacactgctttgccattgcaggacgagtgtcagctaagtaccagtcgcaccatgttgcggtgaatagcactgcttttttgcctttattcggaataaccaaaggagccgctttaccttgcttttcacctagtaatcgcactttttcaactttaccattgtgtgacaacaaacgtaacgtgttatcaagcggcttatcagcttcgtggccttgaaaaataactttttcatcgctatcaattaacacatgaaaaggggtgcccataaattcataatgtttagcaacccggcctgtatgatcggtaaataatggcatgctaagtgaaaaacgctctttaaccttagcaacagcgtgtgcatcatcattgaggtcgatattaattgctacaaattgaattttatcgccatactgttcgtaagcatgctgaaaatgcggcatctgctccatacatggcttgcaccaagtagcccaaaactttaagtaaactggttttttgcctaagtagctttcaagtttgactattttccctgtttcattttctaaaacaaggggggctgtatttgctgatatgctttggcttacaagcaacaagcctgttagtagtatcagtagtattaatttataactcattgtgcgtccctcaaataaaaccaattttaagtttaaggtaagacaaaatattgtaaattttcgacatctgctggctaaatgcagatttaatgatttatcgcaaactaagccatagaaacactcaaaacattaaaaatagcactaaactttttatagatatgcaacgtactacattaaaaaggagtcatcatgaaaaatgaactagacggtaaattaattctttctgtgtatgaaaaaatcattcaacacggtgaagaccatgaagatggaaagctttacgaaggtatttgcgctttttctgatatcgatggatatacagtctatctaaaaggcagtggtgtattacttcgctttggttttcataatacctatcaccttgactatcaacacgaaaaaaacaaagaagactttatgaagaaagtgctttatatcgcagagcaggaactataaataagtaatgaaacgacgggtaaaagctgaatccaagcagcaagttgcatttatcaatcaggttattaatgaattaaaaaatgacccaagtaagctagatattattcgcgacaatcttagctactatcgtgagcaacagtttcttaaacgaggttttttacttgctattgagcgttttgattgggtgtttgaagcaacgaatgatgtagagcaaatctgtgcgcaaattctagccgatgattacattggtaagcgtttgcgccgctatcccttgctatataagggcgtattggaacgtacctattagatttcccaccgctaaaacatgatctgtccggtaaaaaatgctaggttagcgccattttgaaataacgagaactggacatgtcaaaaactataaactctcacaacacccatgagggtggcaataatgggttgtttaaccgatttttagccaccgttgaatttttgggtaatatgctcccccacccaatcacattatttgcaatgttttgtgttgctattattgtatttagtggcattgcagattggtatggtttaagtgccatcgacccacgcccagaaggcgctgctggacgcgaccccgatggtgttattgaagttgtcagcctgctcagtgccgaaggcctacagcgtatcgtcactggtcttgttacaaactttacaagctttgcaccacttggcacagtactggttgctttattaggtgtgagtgttgcagagcactcaggtttactttctgcagctatgcgaggcatggtaatgggcgcgtctaaacgcctagttactttcatggtggtatttgctgcgattttatcaaatacagcatcagagcttggttatgtcgtactgattccactagcagccatgatattccacagccttggtcgccacccacttgcgggccttgctgcagcatttgcaggtgtttcaggcggttacagtgccaacctattgctaggcaccattgaccctcttcttgctggtattactacacctgcagcacaaatgattgatccaaattaccaagttggcgctgaagcaaactggtatttcatgatgatctcagtatttttaattgccattttaggcacgttcgttaccgagaaaatcgttgagccacgccttggcaaatacaacccagatgaagcaagcaatgatttacctaaaaatgacattgcaggtttaaccgataaagaaaaatcaggccttaagtgggcgggtgtgtcactgttagtggtatcattattacttgcatggacaattgttcctgaagacggcattttgcgtaacccagaaacaggccttgttgcacactcaccatttttaaaaggcattgtggtattcatctttgttactttcggtattccgggttttgtttacggccgtgttgttggcactatgaaaaacgataaagatgtcattgatgccatgagtaaaagcatgagctcgatggggatgtacattgtgctggttttctttgccgcgcagttcgttgccttttttaaatggactaacctaggcacaattttagcgattaacggcgctgctctgttacaagctctaaacctaacaggtccagaagtattcgtgctattcattttaatgtgtgcattggtaaacttaagtttgggatcttcttcagcgcagtgggctgtaactgcacctatcttcgtgccaatgttaatgctaattggctacgcgccagaaactattcaagcggcgtatcgaattggtgactcagttactaaccttattacaccaatgatgagctattttggcttgatactggctgttgcaactaagtataagaaagacatgggtattggtacattggttgcgaccatgcttccgtacagtatgatcttctttgttggttgggtggcgttattctacttatgggtatttgtactgggcttccctgttggccctgaatcaccgatttactatcaaccttaatctcatcaaagagatgaaaaaagccaagctaatgcttggcttttttattttttaacggcgtactttttgcgagtaacgtctataaagcgtatataagaagagataaacaattaaacctagaggtaatgaacctccacgtgttttactctcaacagttacccgttttttagagttcactaaaacattaaattgcccctcaacagtaccaccatcaccgtctgatactgtaaatgtcaccgtatcgatcccttcaaaaccaacgtttggtgtataggttaaggtgttatcagcattgataatgaccgtaccattatttgccgatgcgaaaataataatgaatgaattattatcttcatctgacacatttgttaaaacgtctacagttactgggttttgatcctcagtgcttacatccacgatgagagaaatacttggtgctttattttcaacaacatcaacatttaccttagcgtagcttgaaccaccttgaccatcagagattgcataggtaatgcttgccgttcctagatgctctgcttgtggagtgaaatacaattgattattagcaatactaacttggccaatatcaactgaggcagatgttaaggtcaatgagtcgccatcagcatcactatcatttgataacacatcaagataagcagctgtattacgtttaaccacaacagtatcgttttgcgcatcaggtttagtatttgtgccggctaacgttgctaaaccacttgggtcttcgattgcacgattgactagtccatccgcatcattaggaccaccatcttcgatagtcaattgcacacaccagtagccttcttttaagccttcttcatattgtgcatcacgaggtggtgggcagaacccctcaacacccggtgctgaagcgatactattcttactatctacgacaaactcagtccaacctataggcatcaacttgcgataaaccgcattgctcggaaccggagaaaattgcgccataacaatactcacagattgccctggcactggtatatcagtcacattgaagtcaaatacaccattttcatagttaaagcttgcatcaacaacgttgttttgactgttacttgcgaattgctcaacttcttctccagtaattcccgtttgcgtaccgtgtgcaacaaaggcaacatgtcctaggctaagctgcaagcctggctctgtttccattaagaaaaactcactttcgttgaacttctcttgcaacacatttttcgccaaagagactgaatcgatataatcaggaataccgtcattatcactgtcaccataaccttcttgtagatcactaataccgtcaaaatcggtatcttctgaagtgagtaacggtgcagactctaaaattgttaattctaatttcattgagcctgttttatcaccatcactggcaacaatggtaaattgataagtaccattttccacattgctagggtcaaagctaaattgatcgtcaatctgatcgatatctacaatactgtcgctcgacacactccaatcataactatgggtatcagctaagtttgcatcgatcactaatgaactaatcgtcacttcaccagcatgcttatctattattcgtgtagtaaggccgttttgacttgcaaataattgtacgcttggcgcgacattaccctctgcaatagtcaatgtatgtgtacctaaaggaccaattacagcactttgtggatcagacaggctaactacgactgtttcgctgccttcttcaaactcatcttgtgctaaatttacaataagttgcgcctctcgctgtcctttgttaaagacaaactctccatccactaaatcatggtcaagcccttgtgttgcatcgcctgacactgagtatggaacaataacagggtaacttactgcatcaccattgagaatggctttaatcgtcactgttgtcccttctgtagctgtttggtctttactaaagttgacttggggtacaacatggatcagctgagttgccgaaacttggtcactgccttcaccagcagtccacacaacggtatgggtacctgatgcaaaaaatcctttagagctagctgttactcgcactggattacctaaagaatcaagtgcaatcgccgttcccatgtttacttttgtgaataacccctcagatgcaattattctgtcatctggcgctgtaattgtaatgttctgtgatgttgagactaacgaaacaactaaagtcacttcggttatttcaccactgctatctctaatttggtaagtgattacaacttcaccaatcattccaacaggtgcgagatactcaagcttattatcaacaatccggacaacacctgcactggctgtagcattgagaatagttaactcatcgccatctgcatcacgatcatttgccagcacgtctaaaatcacaaactcatttaagtcagtattaatcgtaaagctatccggcacagagataggtgcatcacttactggatttactatgatagtaacggtggcaagctctgaacttacttttccatctgatacttgataactaaagctgtcagtaccgtaaaagtcagcattaggctggtacgtgaaactattagcatccatcgttaacgtaccattactaaccggtgtcactaggttgaatgtcagatcatcgccattttcatcaaaatagctgagtgtaaaggtgatgctctcgtcttcatttgtgctaagttgttcaccgttagccacaggcgcagtgtttgcaataataacagggctggttgcacccgatgtaaaggtctcagtattaccgttgccatcaacataggttactacaaccgttatcgtcgcgccgatatcagcatcggttagcatgtactccgatagtgttgcacccgaaattaataccccattgcgcagccattgataggtaaattcacctacgccatcagggtcttcaatggttgactcaacacgcaaggtttgaccttgtttagcctcgccactgatactaataccaccggttgcttcatcgttaacatcggcaactgtgataacaaaggtttgtgtatcagttaatccttcggcatcagttactaataaagtaacagcatgagtacccacatcatcattagtgggtgtaccacttagctcacctgttgcaagattaaaattaagccaacttggcagttctggggcgctcaacttatagctatcagcactgtctacatcattgataactaatgtataactataaaactcatcttgtgtcgcagaagttaacgctgccgattcaataacaggcgcatcatttacagacaagatggtaatagtcactgaagcaatattggatttagcaccttcgttatcaaaaagggtataactgaatgaatcgattcctacatagttactagtaggtgtatatgcaaacgtaccatctgcattgttcacaacctgcccgaaagaaggagaattcacgatttgcagtgaagaaacatcaatgctgccatctacgtcatcatcattgataatcacatttatcactattgattcatcttcatttatttgcacagtatcattgttagctaacggtgcatcatttacaggtgtgaccgttaatgacacgcgcgctgcgtttgaccattcacctagatcatcttttacccgataggtaaacgtatcctcgccattgctattggcattaggtgtgtaacttataactccctgagacgcgatagcaataccttgaagtggggcgttcacaatttcaatactgctttcatctagactaccatcaacatcagaatcgtttcctaacacattgatattatgaagtgtgtcttccaaaatcacggctgtatcattgttagctattggagcatcgtttatgcttttaatagttaagttaacaggtgcaatatttgacataagagattgttcatctttaaccgcatagctaaagccatcactaccaaaatagttactttgtggcgtgtaggtgatttgtcctgattcactatcaatatttaaaacaccatgacttggatcttttgtaactgttacattttttaccaataactcactgtcaacatcgacgtcattatctaaaatagaaagtatcgtagggatatcttcgtttaactcaaacgtatcagcgcttgcaaccggtgcgtcattaatctcaccaatagtgatcagcacagtggcacttttagaaaatgcccctgctttatcagcaatacgatatgtaaacgaatcgctgccactaaagttggcttttggtgtatatatgatcagttcattacttactttggcatccccattttcaggcaatgtaacgacttcgagagttgatagatcaattgcatcattactatcaatatctttatcgtttgccaccacatcgatttcgaccgccatgtcttcgtctgttgtgatctcatcacctagagcaatcggagcatcattcactgcattgatagttatcgagacaattgaagtattcgaacgactggcttccatatcctctacagtataagtaaaactatctttgccgttgtagtccttattcggggtataggtaattacccccgttgctgtatttagactcgttttaccatgctctgggggtgtgacaaccatcacactagcagggttcagttgactatcgacatcagtgtcattctctaagacatttatcgcaacaatgttatcttcatcaacactagctgtatcattttggctgacaggcgcatcattaacattcaaaactgtcagcgtaaatttctgagtacttgcttcattctttgaatcaacagcaagcaaggtaatcgcatgtttcccaacattttcgtttgtgggagtaccacttaagacttggctgacactatcaaaggttaaccaagaaggcagatttaaacctgagtatgtgatcgaatcaccaggatcaacatctactgcagtaaacttataactatagagctcgccctctgttgctgttgcgacaggagtagatgtgatagttggtttatcattaacattagcaacactaataacaaaatcctgtctgtccgatgcatttaaagaatctgctacaacaacggcaacataatgcgtgccaacatcatcatttgttggtgtgcctgataaaacgccagtttttgaatcaattgttagccaactaggtaaaccaattgcactaaatgtaagggtatcacctatatccgcatcacttgccttaactgaatataaatattcagtgtcttcagttgcccatacctgtgcagaggaagtaataacaggcgcctcgttcttgcgagttacacttaaagaatattcttgtttaagtttttcaactccattttcaagtacatgaatcgtgatagggtaagtgccaatatccgtttgttctgggagacctgttatagttctcgttacggcactataagagagccaactaggaaatgtatcgccgaaagaaacgataatcgttatcgcatcattgtctgcatcagtggctataattttatatgtatataactgaccaacttgcacaactttaacaggttcagattcaatgacgggtagatcattaactgggatgactgtgatactaaagacttgatttgtaattggttcgacagagtcttctcctccatcagctaagtcaaaattaaaactatctgacgtagtttcactaccatcatgcttataataaagctttgaatcatcaagtgtttgctgggtaaacgtgccattcacagcaagtccctcacctgagtctaaactaccattatcattggcatcgacaaacaaactaccattcgtaggtactgatttaagcgtatatgttaaccctgtcccagagtcatcactatcttttgcagataacatactattagtaataacttttgaatcgccttcattaattgaaagtcctgtattaatcgcaatagaaggagcttggtttattgcatttactgaataagttaaaaggacaggcgttacactttcagtgccatcagtaagttcggtggtgaatgtaaattcaccaatgtagttactgtccagagaaaaggttaagttatcaatagtggcatttacatcactggcacttccagatattgttaatacacctgaatttgcatcatagctatacactgcatttccactagcactacctgaaaagtcacctgcgacagtatccgaaagtgaaattgtaagtagaacattatcatcatcattatcagaaacttttacatcttgaaacgggtttcctattgatatcccttgattaatagattgagaagaatctgagaaagatgttgaagtatatttttttaccgtgccttgtgccaatgaattaccatcggcataaaaaacataaggtgtgttttggctatcaagagctatacgattaaagtcagtgaaagcttcgctaaatcccctagctccaacaaactgccaagagttattttgataagttacgacactccctctgtttggatcaactccatagtctgtaacaaatataaagggtatatcgttctttcccaatacaaagtcgggagaaaatactgcgtcaccagtgatatcttcgtggagtatagtccagcttgtaccatcaaatttataaagtgaaagtctctttgtaagtcggctaatttcggttttagtgctcaataatatattgtccttgctgtcaattgctatattcgtgtaatttccttcgacatttgaaacaccggctttgccgacatattcccaagatgagccatcaaacgacataactgaagcactagtggaatctaaagaaaagtctctaaatgaaacgtaaggcgtatttgtactatcaaaagcaagatcagtgtaggctgcttttgctagtgaaaacccttcaacacccacccttacccaattagcaccattatacttttttaaaacagctttattgctgaagttactatcattataaacaacatgtaaaacaccattattatcaaatgctaaattagagtaaaaacctaagccgctcgatataagtgagcctacatcattccaattactcccattaaaactcaacactcttaacctgcctgagttaccttcatctgcaaaagaaatgtatggggtgttattactatcaaaaatgatatctgtgtaataaatgtcaccatttgcaatatttttatttccaacatattcccaatctgtgccattgaacttcatgacgctaccattatgctctgatgtatcagcgaaaattacccatggcacatcgttagcatccagtctaattcttgaatggttcccactgttagatgacccagcaaacctagtactgcctaatgattcccaggcgctaacactcaagctaggcgctacattcgatttagctacatttaatattgaatttttttgcacattataatcagacaatgaccgaccattttctaatgcttgaccattaaaggtgataatctgccgagcttgcgcaatactcgtctgctgctcaacaaggccttttaccgtatcaatgctgtcacttggctcaacatcgagtgtgaaagtctcgttcggtgtgatgattgttattggcatagccagtatagacataggcgcaataagcgctattaggtataggtatttgataattgttgatagcatgacgtagtgttcctgtagaaacttcaagctgcgagtaatatcatcaagagtgatttactcatgttctcagctattccttgagataatttaaaatgtacgccccttgcgcacatcgataatgagttagtcgaagtaatatcttgcgccaatagagagcatcgaagcatcagttgcatccagcgctgcatggtcgtaactaataaaaacttgagtacttttaaaaacagcaatacttgcttcaatgccaaaggtgacactgttgccacttcgttttgcattaaatagctgtgaagagtctatttggtattggtaatcttgttgccaatctaaataccccaacttaccagtcagtgatatctctttggtaacaggccacgatgctaaaagtgatatttgcggcccctttgctgattctgggtaaatttgttccatggtactgtgtaagctgtctatgtcggtgacttcaccagtaaagctgaaatgtctttcgccaaaatctacataaccaacttgcagtgagtagaacgaattgaatttataaccaattgcagcttgataacctgtatctgagtccttaatcgacacagagttaattaaggctccttgttcaattaatgatgacgttaggttctttttgctgaggtctgttgaagctgaacctatttgtcctgataaaaaccagcctgtttgctcagctttgccctgttgactgcaaaataaagaaccagcaaataggatgaatgtagcaagcttaaaaacaaagccatttgaactagcattaaaatatgaagcattcaaagtggggcctcttgaacagattgaatctaattgcaacgtatccactgttaattacgaacatccactttgtacataccatttacattagattaaaatattacgagttcgaatgagaaaattctgattcgaggtgagtttatgaaaattccgacaccctttgttactagttctgaggagggagttttgtatgatatggataccaattaggtaccaacacaacaagattcatgctactgaatttacaatgcttttatatgagatttaaagttttgatgaataaccgaattaaaaaggtttttactctgtgcacagtgtgggctttgatctactgctcatacagcgatgcaaatccaacgaaacaacttgaatcagcatttgccacctcattggttttaactgatggtgacagcattactttaggatttggtgattttgatcctcaaaccatatttaacccacaaaatactgtcaatgaagaagacagcatagcactgagaaagaagttaaaactctacagcattccacttaaatggcaggtaaataaccctatctaccaacacaacattaatgtagtaagtcggatcagctacctaaatcagtcagatttcatttcgctgtttgataatgtagctgacgactatatttctgaaactgtgtataacgggatgctcggctttaacgcagaaaaagctcttggctctaagtggtcatatcaatttggtttgaatactcactacttacattacaacaacgattacgactacaactctcccgagtctaggcgtaatttaaagcctttaactgataacctttacaccaatcttaatagcaatgcactggtgttaaaccctaatgcaaccatgatttatcgcctgcctagatattggggctattacgaatataagcttaactttaattattactatggctgggcactctctcaccctgacggtatacataatgcagcccctgaaacttggcgaacactaaatggtattaaagcaacgtttaacatgtttaagattggaacatttgagcaagcattttatatcaaaggacaacgtatcgacttaggtggtgatagtcgagttgcattcggaactgatcacttttatgagtatggtataggctttttatgggatgcacagcgctggacgtcttggttcaacaattttggtattggcatcaacatccataacggtagcagcctagatggtgctgcaattgtcttatactttaatgaaatttaagtccatttttaaaagaaaaaatttttaaacagactatattcttatattactcaacgacataattattagctaatatacatggaagatatatgaaacatcacctcgcacttgcctgttcattactcgctttaacggcctgtgataaagccccagaacaaacagctaaaacactaccactccaagttagcgtagcagatgctatttattacggtggcgatattctcaccatgacaagtgatgaaccaaagtacgcacaagcaattgcaacgcaaggcgacaaaatcatctttgttggtgatataagtaaagcacttgagcataagtttggcaaaacaaagctagttgatctacaaggtaaaaccttaatgccgggctttgtcgatggtcatagccatgtctatggtgttgggttacaggctatggtagccaatttattaccgagccctgatggtgatgccaacagtgttgagcaaatcgttaatattcttacagccgcacagcttaaccctgattacacaacatttatcgaaaaaaccggtgctatattaggatttggttacgatgatgctgagcttgatagatacccgactaaaatggacttagaccgcgttagcaccgaaaagccggtcattatcattcatacctcgggtcacttaagtgtcgcaaacagtaaagccttagccatggcgggcatcgacgaaaactcagaaaaccctaacggcgggctaattcgtcgtatggcgaactcacaagaacccaatggggtgctcgaagaaaatgcgcactttggtttactgtttaaactcatgcagtcttttgatcctgagttacaagatttaatgctacaagaaggacaaaaactctatacaaaatacggctacaccacagcacaagagggccgagcaactcaagaagcctatgattcaatggtaagagcttcaaaagcgaataaatttgtgattgatgtggttgcatatgccgatatggccaccagcagcagctttatggactcagcctataatagtaaaaactacacgaatcagtttcggattggtggtgtaaaacttaattttgatggctctccacagggtaaaacagcctggttatcagccccctaccttaaagcacctgaaggtcaagaagctggctatttaggttatcctacctttaatgatgaacaagcatttgaatatgttgagactgcctttgctaatggctggcaggttatgacccatgccaatggagatgccgcaattgaacaatttttaaatgctgttgaaaatgccaacaataaattaggaaaaaaagaccgccgcccggtgctgattcatggtcaaacaattcgtcaagagcaggtaaatcgccttaaagaattaggtatttttccgtcgctcttcccaatgcataccttttattggggcgattggcatgtagattcggtacttggccatccgcgtgctgattttatttcaccaaccaatgcggtcaaagagcaagggttgatgtttagtacccatcacgatgcaccagtagcattgccaaatgcgatgcgcgttctcgatgcgacagttaatcgcacaacacgcactaaccaagtacttggcccagaccaacgcgtctctgtgtatactgcactacaagcaatgaccacttggcctgcgtatcaacattttgaagaagcatcaaaagggcaattaaaacaggggatgcaagctgatttaatcattttggacaaaaacccacttaaaattgagccagaaaacctacataaactgcaaattttatacactatcagtcgcggtaaaaccgtttacacaaaacaataatggaatagaaagatgatcaataaactcataaaaacaatgttcatagtcttattatcatttacagcactagctgagcaagcaaccagcatacaactcgatattttaaatttacatgcccaatctgaacacgtttatacatcaggtcaaccgagccaatcagactttgcaaaattaaaagcgctgggggttgataccattatcaatttacgcggtgaaaatgaaacgagttggtcagagcaagaggtagttaaaggattagggttaaactactaccctattccagtgcaatcaaaagccgacatcacactagaaaatgcgaccaaattacacaacttgttggatcagcaatctcagcatactaccttagttcattgcgccagtagtaatcgtgtaggcgcgctagttgcgctctatcatggtgtcactttgaaaaagccaatagatgatgctgttgaaattggaaaacaatggggactaaagagtttagagcctgtggtaagaaacaaaataaaagaagaaattggtcagcactaagctgaccaattttaaatttatcaaagctgccatgcatagcttagctttgtaaaaaatgtacgttgatcgcgctcaacaccttgcaacgaatcgtcttgataacctttgtctgaataacctaagtaaaacagcgtctgcgagttaattttgtatgaatacactaactgactgccataatcacggttagtttggcttacatcaaaccgataagcttcattatttcgatcaacatcttcaaactgcaaaacaagctttaacattgagcgcatattaaatttataataaacacgtaaatcggttaagttcgccgtataaacacgttcattttgttcgttatctaggtagctataactatgctcaagttgcacttgccaatgatcgttaatatcccatgtcatttcaggttcaattcgcaccatagtacctagagctgcattactgtagtcaattttgctgccatattgagcatacaataagaaacgaacatcccgaatgggcctaaaaccgccgtaaatataacctatgttctgattaaagaactcaccggcataaaactcattacgatgaataaaaccaatttcggtttgcgactgcatcttacctttaaaagtaaaatagccatcatattcttcttcaagtaggtcaccattttgtgcccacgttttatcccactcggcgttatagctatactcagtaatagcatcatcagcattgcgataccaagtttgcccaccgcctagttcaattttttcataatcgactttcgcctgataaccaagatctgaacgatactcttcgccgatattttcgtagctcgcatacagctcatagtcacgtttagttcttgtaaactcaatggcataagcttgatccgattgatttttatcgaccccgtaatagtctactaaaaagtctgcattcgtagtgtctgtcgttgctacttgatactgcaaactatctgactggttaaaccaataactcccatctatcgataataccgtattatggtaatcatcattttcgcggtgggtgctcattacgccaatcgtccctttttggcctatatcaaattgataacgccctgccacagcttgcgttttatccgccaaattcgcaaaacctgaaccttgattagtcggtaacaatacactggtattctgatcgtcagcgtacataaagccataactgtgtgcgccggttttacctgttaacttcaaaccgacatcaggttcagcaatcattcgcgtatataaaagctctagttggcttgtgttaaaataagaggcaccatctaaaaagaatggacgcttttcagcataataaatcgagtaagttgtatttacatcaagctctaaagagtctgcttctacttgagaaaaatcagggttaatagtggcgttaattaccgcatcttgagtcaccccccaacgtaaatctaaccccgcttcagtatcaatatcaccattttgccaatcacctggcactgtgtctttggtatcatgacgaagcgccgttaaagttggtgtaagctgaatgttttggctttcagtcatgttggcaaaaccagtaagtttatcaaactgacaaaaactacattttacatctcggtcaaagccaacattcgacatctgataatacacatcacgcgggtagtttcgccaaactgcaaagctccacgttaactccgtttggtcttttggaaaccgaagtgctgtgaatggaatacgcatctcaaccacatacccatcgtcagttatttgccctgcactatcccaaatagcatcccatgatgggtcttccacccaatcatcaatatcagtcatgcgcatatcgccttgcgcaccaagggggtttacgtaaaactcatagccggtacgttcatcattgaaagtatctatcatcaaggcaacattatcgtcttgccaaagagtatcgcgatcacgaagagcggcgcgaatttgtgaagggtcattgtcttttgcaataaacccaacatataagtatttaccatcttcgtatataaacgcatcagtttgaacaagtggtgtgcctttttcggtcggttcattttgatatttcaaaggcacttttgtcgcatatttccagtgaggctcatccatcacaccatcaacactaatagactctttaatatgggcaagcgaaaattctgctttatcaaatgcatgtgtgtaaaaaggcatgctgataacgctaaataaacaggtaggggcgatgatttgatttattattctttttaagtactgcataaacatccatttagagactgatgcgttaaaaacgctatttaactgatttcaaagcgattgtaattcagtgaggtacatttgttaacctaattctacatttcgacagctaaaaattaacaaaacacgccttttgtattaatttcagagtaaaaaaaagccccatcacctttcaaagtgatggggctttttttacaactaaattattttttaagacttaacttattgccttttaatgatttacgcacatttgcaatacgcgaacggttctttgcgcgggcctcacctgtagcttggcctgatggcttgtttgtacgactacggcgtaaatgcgatggctttttacctattttctcaattaatacatcacggttacttacttcgtaaccaggcaatacgattcgtttaatgcgttggccaattagcttttcaatatcgaataaagtattttcttcttcacgactaacaaatgagatagcctcacctggttttcctgcacgaccagtgcggccaatccggtgaacatagtcttctgcaagccatggtaaatcgatattaataacacgcggcaagccttcaatatcaataccacgcgcagccacttcggttgctactagtacgcgaactttgccttctttaaattcacgtaatgcgcggcgacggttaccttgcgtcttatcaccatgacaaacaacagcagggataccatcaagattaagctctttaacaagctcatcagctgtttctttcatgttcacaaaaaccagtacttgctgccagtttttcttaccaattaattcagataaaagctcttgtttacggcgctcttcgactggataaacaacgtgttgcactgtttctgcggtactgtttgtttggtctacatgaatgatttctggttgttttagaactttacttgcaaactgtttaattgccgcaggaaaagtggcagagaataataaaatctgacgcgcttcattacagccgttgatgactgtttgcatatcattgataaagcccatatctagcatgcggtcagcttcatcaagcactaaatgttttacacttgctaagctgatattacctaaacgaatatgatcaagtaagcgcccaggtgttgctacaacaatatcgacacccgctttaagatcatttgcttggccagctaaatttataccaccaaataagcacactgttttaagttcggtatacttagcaaacgatttgaaattattagcaatttgttcagcaagttcacgagtcggcgcaagcactaatgcactcggggcattattatcactaactgctaattctgataacttttggattattggtaatgcaaatgccgcggttttacccgtaccagtttgcgcactaacaagtacgtctttgccttttcttaccgcaggaattgcactacgttgaacgggagtaagcgtttcgaaattaagctcatctaatgcctgtaaaagctcagaagaaaaactaaatgatttaaaattcatgctgtataacctgcggccattatatcaagggtcgcaaattatacagaaaaaaaatgattttagttagttataacttaactaaatatgcgctaaatgacttaatctgcacttaaagcaaaataacgtcttgctcagctaaaatatttgcctcactacccacaatatcagcaacattaagttcgttaatataacctaagccaatttcttgctgcgcatttgttagtggcacataaggtaaacggaacacagggttcaccgcaccagtcatcatcagcgccgtattgatcgcaatcggattaggctcgcagaataaccagttcataagtggctgtagttttgtatttagtgcctcatttttttcatccatcaattgacggaaaaggccgggaattaagttagatgtaactgagatcacaccatgggcattatgaatatgccttgcatcatgcgcttcatcgtcattacctgaccaacaagctatgccttgctgttcataatgtgcgatacgctcattaccaccgcactcttttacaccgataaaatgcttgtgttttgccaaaggttcaatgatatcaggtgttaaatcttgacctgtgcgacccgcaacattgtagataaacgccgggccaatatcgagtaaacgattaaagtgctcttttacaccagccattgacgtacggccataatatggattaatttgcagcgccgcatccatacctgttgcaaaaccatattcagttgcttttatagcttcacgcgtattgttacttcctgtgttaccaacaattaataagcggtcagagaatttgctcacactgtgtgcgattagcattaagtgctcttcccaattcattagttgaccttcaccggtcgtcccaccgacaataatgccatcaactccagctgcaatttgctgttcaacaaggtcgtcataacaagcaagatcaatttcaccattggttaaataaggtgttttaatagctgtgatcaagcttgcttgtttaattgtttctaggctgcgcataacttttttaatgtttggaaaatttgcgctagttgtatcataaacccagccattttccgagtagtctgatgcaataaataaaaaaacttgagaaaaaatcaaacttaagccaaaatcaaatactgtataaattaacagtatttattgtgagtaattgataatgcaactttccaaatttttggcaacctacttttatactactgaagagctatgtcaaaccctctcaattgatgaggatacgcttgcaaactggcaacaaagtagcttatttcccaaacctagttattgtttgcagagtcaattagagtgcagttcatattcaggtatttatcagtgtgaagagtatcaagactattacccgcgtggtgcagcaagttgggggcaattaatcataaaacatgacataagctcatcatgccaagcctttaattattttgctcaacattactcaacacaacttgctaaacttgctgaacaagggtttgccattgacgaagaattgtttggtagcgacatagatgagcatttacaacaagtatggcagcaatttctatgcagcaagtatggcgtgctaacccaaaatggtctcgttgaagaagctgtgcaacttgatgttgctaaactgcttattgatgatattactgagcttcggacaaagactggtttgagcgtggaagagcgccaaaccctgcataaagcactcaaactcatgaatcgcgcattgagtcacggtaccgggcacgaaggtaaaaatacccttcgccatcgttacattgatgatgtggtggcaaaatatgatttatcagtaaaataacggctataagatccgttttttcttgaaagtgaacataccatgaacccatgcacaaagttacaacaatgtatcacatgttaaattttagttagtacattttgctacttttgttttgtaggttttcagctagatagccgttaaattcatctcgaagagttatctttgggtcattaaaaacatgacagcctctcgataactcctttcttcccaataaattatattaaaacgaaggatgaatagatgaaacctttcccaaggcttggtcgcgtcaaagcgacctacttggctatgctcggtttaacctttgctcagccaactttagcgcaaactaatgaagtaactaatcaaactaaagcagatgcgctttcatttaccctgatcaccggtgataaagtctctgctgtcgtaaacaaagatggcgaactaagcggcattcgtatgctcaatgctgatggctccgatgcaattaccagtatttttaaacgcggtaagagcacatacgttgtacctaatcatgcacaagcgcttgttgactctcaagcaatcgatttagaactatttaacattaataagttgtatgaatctggctatgatgatgcgtcaacagatgctttacctgtgattgttgagtacaaagacggaactctagctggtgcggccgttccatcagccttagcaggcatgtctctgactggcgaaatcgagctaatcgatagtgcagcgtttgctattagcaaagaaaaagcggcacaaacctggcaaactttggcttcacaagctgatgtagaaggtatttggctggatgctgtagtgcatgcacacaaagtaactcaatcagcagccctaacacctactgtgccattaacaggtgcttatggtgaatctgcaattaacttcaatggtgcaggcattaaagtagccgtacttgatacaggttatgatactgaacacccagacttacaaggtcgtgttattgcatctcgtgactttacctattcaagcaatggtgtagatgacttaaacggacacggtacgcacacagcttcaactgttgcaggtaatggtcatgagtcagatgggaaatgggtaggtgttgccccagcagctgatctcatcattggtaaagtactgagtaatactggctctggttcaaccttcggtatattaaatggtatgcaatgggctgtgctttccgagcaagctgatatcgtaaatatgtcattaggtggctcgggcactagctgtggtggcccacttgtagagatggtggaagcgctgagcgacaaagccctgtttgttatttctgcaggtaatagctttacccgcgagacaattggtctaccaggctgcgcgccaagcgcactgactgttggtgcaattgatagagaaggtaatacagcttcattttcatcacgaggcccatcgccagatggtcattcagcaaagcctgatattgcctcacaaggtgtgtctgttgtagctgctgcttcaggtggtctaggcgatactgcataccgcgtctattcgggtacctcaatggctgcgcctcatgttgctggtggtgctgcgcttgttatgcaggctcgtgcagagcttagtccacaagaaattaaagacgttctaacttcgtcagtatttagcggtgattctcacgttcttgagcaaggagctggcgcgatgaatatcgaccgtgccattaaccaagctatagttgcccctgccaaccgtgaactaggcttttttgaaaacagtaatagcgatgaatttacacaaactcacatcacactgactaatacgtctgattcagatattacccttaaactgaagctagatttaattggtgaggatggcaaaacgcaattacctgctacgctggcaggtttagataccaaaacaatcaccataccggctcaaggtgaagcaaatgtacctatgtggattgacccacgcgttgcacttaataacggtgcatatggtgctatcacaggtcgagttacaggcacgactgttggaacaagcgatcatcaagttacagttcctgtctctttttgggttgctcaacctaccgtgcaattatctgttaacttaaccgaccgctggggcaatccagccacttcaccatcaaagctttatctaatcaacgaagaagatgattggggtagcttggtcagattatctggcggcaaagcgagtattgatgttcctgcaggttactacacactgattgcaaacatcatgacattcgacaacccgcaaacaagctcaggtttagttgaatcagcagcacagatggctgttttaaaccgtaaaattgatggccaaacgcatatcgattttgatgcccgcagcgctcaaaaagttacctttaaagccgatcagccactcgatccacaaggctattcttttggttttacctatgcaattgacgatgaaaaagtagctaaactcgcagcgattgagatggcaccagattacgtcaatgagatgtatgcttggtcacagggccatgatgatcgtttccgctcattcattaccactcgtgccgttgcgcctgagacaacggtcatgatgcaaaatggcgaaaagcttgattacatcaagcaaggtttagcattgtcattccatggtgaagggtctgctgaagttctccctgtcggtgatgctggttatagcacggattggagccagtttgatctggatggtaaaattgcacttattgcaaatccaaattatctcacctcttacatggtaggtaatgctatgaaacatggcgccataggcgtgattttctatcgtccagaccgtggtggtcgctataaaggtgcaattacaggcacaccaaaggtaccagttatcggtatcagcactgaacaaggtgaaagattaatggccgagattgaagccggcaacaatcttgttagttggtcaggtatagcggctgaacgctcgccatacgcttattcaattaatcacattactgatggcaggattgagtcagggcaaatcaatatcgctgaccatagaatgcataagatcactgcctcgtaccattcacaaaatgatgaacgtccagcttggactgatgtaatggcaatgaccaatagtaccggtgaattttattcgacgggtagctcacaacttatcatgttgcctcaggtacgagacgagtattacaccgcgacagctaaaaatgcctggactaacgttgttatgcctaattaccaaattcaaagtgcgggcgcttattttgacggtcctcgtgctatgaccgaaggggctgaagaaacaacaacatggtttaaaggccctcgagcaggtagcttgggcagcggtggttcaccgattattcgtcgagatactaatgtactttactttaatcttgcctcgtttggcgatgcgtcaaaccatgacggtatttttggctatatgggcagctctgcatttggcttacgtttagatggcgagccagtatttccatatcaaggaaccttaacactcgagccaggcgaccaccaagtaacccttgaaatgcgctcttatgctcgtggtgttggtgagcgttcacctgttaaagatcatttagggtcactctatcaaggcttctacacctttactgctaacgaacaacagcagggtgcacaacctatcttggtgcctatgatcgacttacctgttgatattaataacagcatgcaagtgggtgaagcggcgcatattaaactaacaggtttactcgatggagttggtgaagtaccgcttgcaaacgtcgagttccaatacgcttacggtcaagaatgcggtatcgaaacagtccctgcttatatttattgtccagtatcgactcagttttcaaccgaaaattggcttgatgctaaagtagaacaaatagacggtgaatgggttgctactattccaaataccggcgttaaaggagactttgtacatattcgtactatcgtttctgactatggttcaagttctgccgaacaaattactatgcgagcatacatgcttgactaataagttaatgctataaactaaaagccgcctttgggtggctttttttagttcaaaaaaacaacaaaacagttaatatgtttaggtaattcagctataagctaatctaaatgctcatagtgtccacgatagacttcaaaggttttaaccacggtatgttgttctttacttagattatcaaaccaatgatcaaaacgctcatcatcgtcctgctcactaagtgctagatactgagccaaaagctctattatgtcgttatgtgaacacagcaaagtatcaacttggtttgctaatgtagagtgatctttatcgcgaagcgtgttcattacattttgatctagttcttcgcggccagctatatcattcacttccatatccctctcttaaataagcacgcatacctagttataacagccttattaacaatagccagttttttaaattcaactgctcactgattgttcataatgactaattttaagccaaccaacctacaaataagaattatttttaccttgaagcctgtctctttttgctttatatttgatacattatcacataacacaaaaggtaaataatgaagcctaatatacaccctgaataccatcaagtagcgtttcacgatactgctgccgacagctactttattatcggttcgacgattaaaacatcgcgtactatagagcttgatggtaaaacatacccttacgtaccaattgatgtatcgagtgattcacacccattttataccggcaagcaaaaagcagtagcaagcgatggtcgtgtagctgcatttaatcgtcgttttaaaaacttagcgagcaagtaaatcgcgtttaggagttaaaatgaaagtattaagctctcttaaaagtgcaaaatcccgtccgggttgccaaattgtcaagcgtaaaggccgcgtttatgtaattaataaagacaatccgcgctttaaagcagttcaaggtaaaaagaaaaagcgttaaaaaaggtgcttcagcaccttttttaagtctaatttcgaaaattaaataatattattttccaaataacagctgccaaaaacctggcggttcatggagttcatggtatttttttcgtaaatcatctattgatttaagaggtactttcgctgcatcaagtccctgcttgctggctagttctttagccagatttgcctgtttgattactttatcaagtccttcaagagatgctgttttatgctgtttaaagtcggctgtccgtgctttttctaacaagtgaataaactcatcaattgatgtattaaacacttcaagactcgttgcacgaaccgagtttttataagccagccccatattcttcatatttgcttcaagatcgagctcttctgctacacagactgccgagaaaaataccaataaggtaactagaaaaaatttcataaagtactcatgtggaaaaacttggccgcattatatgtcgaaacacatcatcagcctaattcaaaaagttagcatcagtttataaagcattattacgataccaaaaatcacatctattgataatcattttcattgcataaaagccaactataaatagtcacattatcaatctaaaaaaccaactcaacaataaaccattgttataaaaaagttttaagtggctacattttgctacgaacttttgatttgggaacaatagggacaatgctagagtgatctcgttaacatttggaaaacatagttaacaccccacccagggatagaacaataaagtaacaggtgaaataatgataaaaaataatcttttaggtgctagcatcaagcttgctctatgctcatcggcgcttgctatttcaggtcagtcatttgctgctgatgaagaagtaaaatcaatcgaccgtatagaagtaactggttcacgtattttacgtgaaggtgctattgcccctgctccagtaactgttatcagtggtgaagacttagttaacacaggtgctgtaaatattggtgaagcactaaataaattaccagcccttggtaacacttattcactagcaaactcaggtcgttttatcggtactgctggtctaaacattcttgatttacgcaatatgggtacagaccgcacacttgtacttgttaatggtaaacgccatgtttctagctctgcaggttctcaatctgttgataccaatacaattccaagcacatgggtagagcgtgttgagatcatcacaggtggtgcatcagctgtatacggtgccgacgctgtaacaggtgtagttaactttattcttaaaaagaacatcgaaggcttaagtgttagtgttactaaaggcgcctctgaactaagtgactacaaaaacgaaaaagcaacgttttcatacggcacgaatttcgataatgaccgtggtaacgtagcctttgctgttgaatattcaggccaaaatacattaaatgcgcttgatcacccatggactgatggctctttctttagcttgcgtaacccagctcaaaacgaagaaaacaaagacgatccaaatttccctgatagaatttacacaccaaacgctggctattatgcgattaataatgcaggtgtttttgcatcaagcaatggctatgttaactcattcaacccagatggcagccttcgtgacatttatataggtgaccgagtagatggtcttgcatgtgctgactgtgattcattcaaccttgcacaattcaatgaaattcagcctgaatttgaacgctacaacgtaaacttcaaagttaactatgacgttgctgaagacatgaatgcttatttcgaagcaaaatatgtaaacagcgaaggcgaaagcattggccagccagcatttttcttctttaacccaaataacagcatcaagattgacaacccatatcttgactcgagtgttaaagatctaatggaacaagagggtgttagctcaatcatggttaaccgtatgatgacagatttaggtcgtcgtatcgaaaacaatactcgtgaaacaacccgttttgttgctggtttgagaggcacagtattcactgattgggaattagatgcatcagttgttcatggccaaacagacttagagcgcattaatggcgctaacatgattatggcaaactactacaatgctcttgacgctattgatgatggcgaaggtaatattgtttgtcgtagtgaagaagcacgcgctgaaggctgtgtaccggtaaacatcatgggctttggcgcaccaagccaagaagcaattaattacattaatacggtatcaacaggtacttctgagattactcaaacagtagtaactgcatcacttgcaaactcagcaatctatgaattaccagcgggttatgttggctttgctgctggtgtagaataccgtaaagaagaaagtgaaactaaagagccagataatgctgtaggtacattcttcaacgcactgggtgaagataaaggtgattttgatgtaaacgagatttacttcgaagcatctatcccattactagctgacttaccacttgttcaagacctagtacttgatacagcagtacgttacgctgactacagcacaattggcgatgcaacaagctggaaagttggtttagattggacagtaaacgatcaactacgtgttcgtgcaacacaatctgaagcacttcgcgcacctaacattggtgagatcttcggtgcaccgagccaaacattctacaacgttgatgacccttgtttagctgataacctagatgatttacaaaattcagaggttcgtcgtgcaaactgtgctgctttaggtgttcctgcaggctttgaatcagattacgactcacaaacccttgaaggtttagtaagtggtaacagagacgttaaaggtgaagagtcaactagtacaactattggtttagtttaccaaccgtcattcctagaaaactctgttattacaatcgactattggaaaattgaattagaagacgcaatctcaacaattgcctctcaagaaattcttgaccgctgtgttgacgctgaaggcggtatcaataaccaatattgtaatctaattacacgtgatagcacatcacatgaaattacactgattcaaaactcagtattaaacgtttctggtcaagaagcatcgggtgttgactttgagttaggttatgattttgacacactagaaggcaacttctctacacgtttaattggtacatacctaattgaacgtaaagacttcccgttccaagatcaacctgaagattacatcgagtatgctggtacaactggtgaagcgaaatggcaagctaacttaactatctcttataagcgtgatggtttctttgcaacgtttgatacacgttacctagatgaagtaagcctttacacagaccaagagttagaagataacccgaatccaaatagcttaatgaagtttggtagctatgttatttctgacgcaacagttggttataacttcgaaagcggctttggcgttaaagtaggtgttgataacatctttaaccgagagcttccattcggtactcgaggtacaggttctggtagtgcaagttacgataacatcggtcgtttcggctacttaagactatcttacgatttctaatcgttaaaaactttgattctcttagggctgcacatttgtgcagccctttttctatcagatattaaaaaaataccctattccaatcatttacttaaaatctaccaattcgcgctatactctaccctaccggtcttttaacctaataaagccatgcttaaaacagtatttatcactatctgtctattttacctgcctggtgtttttgccaagcaaagtattatttttattaatccaggtcatgcagataccagtgtaacaggcccgttttggtttgaagtgtcgcagttgatgcaaaacgctgcaaaagactttgatctcgatttaactattcattatgccaatcgaaatcatattgaaatgaaatctttagtgactaaagcaatcaaagctaagccagatatgctcattttagttgatgagaaaagtgtgcttacgcaacagcttttaagcttgtctcctgtacctacacccatctattttttactcaacagcccatctaagcaagagctaaaacttatgagtgatcatggtattaatgtcgctggtagcgtagtacccgataacaagcaagcaggccaattattagccaacaaactaattgaaaagagccagcaagctgccaacattttcgcaattaatggagactacacaacccatgcagcccttgatcgggagcaaggtttaaagcgaagtgtggcatctaatactagtgcaaacattactgctaatacagttgccaattggtcaaccaaacaagcctaccgtcaaagccttggtttttttaggcatcaaccaactattaatattgtttgggcggcaaatgatgcgatggcgttaggggcaattgctgcgcttgatgagttaaacaaacgcaaaaacgtagtggttggagcaattaattggccgcttagggcggtggccgaaaaaatagatgtcacaatcggtggtcatgttacgctcggagctttagctatagtaaatgttcatgatctactcaataattactcaactggagcaatgcatcaagaagtggctattttcagtcaacataacgaacaaacgctaaagctcgtagaacaaattcacagtaataacgtggcaattaactttcgcgttttcagtaaagcacatataaaccctcttccctttagtgttgaatctcttctcttagaggcaacaaaaagcgcactgtaaagggcgttgacagtgcgtttttaaaagggtttacagctatagtgattgtaaaaagctgattaactgtgctcttttttcactgctaagctctgtaaattcacgcttacttttttcagcttcaccaccatgccataaaatcgcttcttcaagtgttgctgcacgcccatcatgtaagaaaccagcggcagggttaactgttttcgttaaaccaatcccccaaagcggacgcgttttccactcacggcctgttgccataaaatcacggcggttgtctgcgagcccttcacccatgtcatgcaacaacatgtcggtaaatggccaaatttcttgcccttttactgccgcaggcgctgcaacaccgcccagtaataaagcggcaccatttgcggttacaaaacgaggcgtatggcaaccagtacagtttaaatcatcgaataaacgtgcaccggctttaacatcttcgtcggcaacattacgacgtgctggcacagcaagcgtttctgcgtaaaacacgaccgtatcagcaaactcatcactggcttctggcaatccctgctcatcagaaccagtatcttgatagttagtacgagataaataactttcgtgcattaatgtattggcaatgctttcttcagggaacaatgagttcgttacccccatgtcaccacgtagtgcacctagtgattgctgtctgactgacggtgtactggctttccaaccaaatcgtccaagtgaaacagggttttcatcacccgcttgagccttaacagcatcaaatacccagtttgctttaccagaaattccatcgttgtcggcatcatcgacatcttcaagcgctagaatatcttgctcttcaatcgcttcaagcaatccaagaccaaagacaggcataccattacgggcactaaaacgtacatcttcattggcaagggcacttaaactgaagttttcaggtgagtcccatgcattatcgatagtaaataccggctttttcaacgtgacagtacttccatccgggtagctaaactctgtgtaatcatagcttagatatacatcagcttggccaccaaaattatgcgtttgccagtcttcacgggcttgtaaaatcccccggtgaaagagttgatccccaaacccttcaacgcctgtaacctgacaaaaatcattgacactacttggcatttcacacacgccatcagctaagctaacgcgtaaaaagatccctgcgtcattcgctaacttcacagtttgctgttcagcggttggaacaatggtacttgggcgaccatctcgttggtgacaagcattacagttattgttattaaaaacaggccctaaaccatcgagttccgggtgtgcatcattcggggctgtcgtaaaggatgtttcaaaattagcatcgccagttaagtgaatatcgcgttctgaatcacttaaattaggcataggtgtagagaaaccatggcctgaattattggtatcgagggctgtcgcattacctgccaaggcaacgacatcaatataatttggatccgtttcgctgcttgttggtggtggtgttgtcgtttcggtcgcgcttttatcgctggttttacttccacatgccactaaagatatggctgtgaaagcaaatagaattggtttaattgcttttacattcatgacggtatcttgtaaagaggggaagcagatgcttccccagcgattataaattccactctttgataagtggcacaacttcttcttcaagggtcgcttgtaattcacctagcgcatcaatcgctgtttgaattcgaacgcgaccagcatcatccttaatcgcttgtctaaatggcatatcatctgcacctgcaatggcatcaatcgctgcaatcgctgctgaaatttgagtttcaactttcgctgctagttcagcgtcaccggcattgataaatgctttaagacctgggctgtcgttttcatcgctgaatgtgcctaaaaacacattttgtacaccaacaatgttgttgctaaagtcagttaatgagttccagctatattgtgattcaaccaatgatgtatcagctgtgtctttgctagtaccgaatggttctgcaattttaccgttacctacctcatcaacaataccgataacaccattgactaactcttcaataacacctaactcagatgagtatttatcattgcccggtgttaataaataatttttataagcaggttcatcatccgcatttgcagagataacccatgcatcaacaaggctttgtgtatgaatattaaatacttcagcacatgcaattaagtattccatttcacgcacagtcatttcatcaattgacttatcgttatcttcaacgccattaccgaataataagaactccatggtgtggaaaccttgtacaccatcgtcaaagttcttcacattatcagctgagaacgttgtgttacttgcaagtaatgcttctaaatcagcggtattcagtggccaagtatcaagatgtggatcaattgataaactatcaacaggaccaaagatatgtgactcaccttgctcccagaatacacgtgcatctttccaagctttttgagcagcagccagcgcagcttcgtttttgttttctaataatgtcagtgtcgcgttatgtagaaccgttgccttgctgtttagcatttcgtaaccatcaacaattacttgctcagttacgttttcaattaaatctgttgcgtcatagctaaagcctgttacttcagtaacaggtgtgcttgtatctgaagaatcgtccgaagaagacgaaccacatgcaacaagtgttgacgctaacattacagctgtaatgctgtttaatacagttttcatcccaagattcctttatagttctgtagaaaatttatagccaagagaggcgctaaagtgagtcgtgtcatcgatatcgtcttgtgcgtaataacgatgaccgccctgaagttttagaattaagtttttgtttggaaggtaatttaaaccaaagttaagctcacgaatgtcgtaacgatggatagccgcaccactggccacttcaagcattgggttggcataatcaaaagaggtaaatacatacaacggcgaagataaatcaaacagcccctgcatattataagcggcttctacaaatgcagattctgctttactaccaagctgtgcaaagcttcccggacgcagacccggcgtagttttattcgcagcagtgatagcaactgagtcttctaactcgccatataagtactgaccacggaacactagatcatctaacgtccatgcaccatgtaacccgaggatagacacgtttccatccacatcaagtttgccctgattgcgacggttatctgatgtgtttgccgtatagtaactaacaccaaaacctttaccggctttaacattgccataatcaaggcgtaatgtgagcgctaaatcatctgcggtattttcttcaaagcgttgctgtgcaccacccgctacccaattagtcgaacggaagtattcagagttaagacctgtcgtcaccaatgtttgcagtgtaaagtcagaccaacgagaaattaagttaactccagtttcgtgccaaacttgcgggatcatggttgcctcaccccagtggcgagtagtggtaaagtattgatcaggcttgtttaagtctgtgcctaagcctaccggaacatatatatgaccaaacttgacagtaaagttagggttatattcatattctagttgcagcttttcgacaatgacttcaccacccgcttcaacttctgattcaaattcgccaaattcttcaaagccgtcatattcaagcgtggtacctgtaccgccgtgttcatactcaagttcaaattcgactttccacttatcatcaatttcatattcaaactcagtgacaactcgctctaagtctgtagtggcgcggcgctctggtgaagtatcttgaacgttggcaaacacttcgtcacttttgtaaagcaaagtaccatagcttttaaaagtaagttttgagtcttttttgcttgcgactgaagcaattggggttgcttgctcagtaacaactggggctttttgctgcactgcaacttgctgggtgtttttcgcatctaattgactttttaagtaatcaatcgctttttgttgttcaaggagttgttgttgaagtttttcgagttgggcttgcatgtcatcattcgcaacactataaagtggagtcaaagccaatgacaccgcgagagagagtactgctttgttcatcgtaaagtgcacctaaaaataaaaccaaatgataatagttatcctttacattgtaaatattgttaactttactttttgaaaaaaccggtaaattagattaaataagatttaatttctaagactatttaattgaaaattaagctggaatgataatttggtgtgcaataagggagcaatttacgataactgtaagttacttgttaacaagcaaacccacctgataggcttacttgttaacgataagacttgtattatcttgatgataggattatttattgctgagccaaactgcttgatatggagtcagcgacaatgtttgtgtttgctcagtaatttgctccccgcttattaaatctcgccactgctcggtaccaatcaaatttaagtctgcaagagtaagagtttgcgtctcatcactaatgttataaacacaaaacatgctttgtgaacggttaatactttgtcgccaaaaaccaaataacccctcacttaaatgtaacgtatattgcgtcgcattagggtgaaatgcgctttgcgccttacgaatagccatcaagtttttcatcgctttaaacacagtacggtgatgggcattttcattactcagttttgctagtaaatctgattcttgccaacggtgacggttaatagcccgattatgttggctattttcaaagcgctcataatcgttggtagtaccgagtaagctatgaatgtacaaaccaggaatgccttcaagcgcaaacataatggcatgtgcacataaaaagcgagcaactccccacttatcagggcctttatgggtaccttgcaatgcatcaaataaagcaatgtttaactcataaggggtgttagttccatcaggtgcggtacgcagtgagactttaccgccatactttgcagtcgtactgaccatttcggcaatttcactttgctccaataacccttcgacaggccttaaaccaataccatcatgtgaagctataaagttaaagtatgcggtcccttcttgaggaggtggcatactcatcatccaatgctttaatgcagtgctgtcgccactgagtaaagtgtgtaacaacaacggtggcaatgagaagttgtaaatacaatgcgcttcgttggcattaccaaagtacgataggttttcgcgatttggaatattggtttcagtgataataatcacattaggctcaaagtgctcaataagggtacgaagtagcctgatcacttcgtgagtttcaggtaaattaatgcaacgggtattgagctttttccataaaaaagccaccgcatcaaggcggaaaatacgcacaccattatctaaataatgacgaataatacccacaaactcgttaagtacatctgggttggcaaaatcaaagtcgacttggtcatgactaaacgtacaccacacatgttgcaaaccatcttttgtttcgaccgcttgtaaaagaggcgatgtacgcggacgaacaacctgcactaggtcgtcactcgggcttgccgttttaaaataccctttacccggctctttgccttgaataaagttttcaaaccaaacgctgcggcttgaacaatggttgatcaccaaatcagccatcaatctaacatctgctgaaatatcacgaatatgctgccaactgcctaacgcttcattcacttgcacataattcattaccgcaaagccttcatctgagctatatgggtaaaatggcaaaatgtgaagtgcattaagctcaggcaagcattggctttttacaaaccgatgtagagtatgcaaaggtggctcttcaggctttgccacggcttcatccgtattcgcatggcgaatgattgaatcaccataagcaattaaaatcatgtcttgctcatcccaacggtttttatgcggcgttgggtcacgtacaggatcatcacctaacatggtattgataagcctgtctgcaagttgttcaagcgaggttgataactcaacctcggcgtagatacaggttaaatgctgtataacccgttgttggagtagctctaaagtcacgtgtcttctccgttaaataaattctttgttatcaagctctacggcttcttctaagcgagcaaatacatctggcattgccgaagcgactcggttccaactcggcacaaatggtgcctccattgggttttctaagaagtgctgccccgcattcataatgttttgcgcaaacatttcaacggctttctcttcatggtgaatatcaagtgttaaaccattcatcagcgcatcgttgtgataagtttcgataaaatcgagtgcgatacggtagtaagttgcttttaatgaacgaattgtttcgctggtaaaggtcaccccttgggtagccagctttctgaataaagctttagtaatatcaatcgacattttcgacaagcccgcagcttggttttctagcgataggtcttggtgtttatgatcatagttatctgcaatatcgacctgacataaccggttatgcgagtaattgcgatacatctctgatagcacgccaatttcgagaccccagtcacttggaatacgaatatcattaagtacatcgcgacggaatgagaactcacccgctagcggataacgaaacgagtccatgtattctaaataatcgttactacctaaaattgttttaaatgagcgtaatagcggcgttaccaacaaacgtgacacgcggccattaattttgccctcagcggtgcgcgggtaaaagcctttacaaaattcatagttaaaacgagggtgagcaacaggataaattaagcgtgctaaaagtgctctatcgtaagtcaaaatatcgcagtcatgtagtgcaattgactctacttttgaggttgccaacttataacccatgcaataccaaacattgcgacctttacctagctctcgtggcgcaacgcccaatttttgtagttctttatcaagcgcttgtaaacgcgggccatcattccaaagtaccttatgatgttggtcaagctcagcaaaaaactgtaacgcatggcgatattggctttcgtcggcgcgatctaggccaatggtaatttgtgataagtaaggcacatgtttgagctcagctataatattttgcaaagcgggtccttctaactcactgtaaagtgagggtaaaatcaaacccataggacgctgttttgaaaaatccaataactctttttctagttcttcgactggacggtcagcaatattgtgtaaggtcgtgataatgccattttgatagaaatcagccatgagattgctcctgttttgctgcaaaacgcgctttgatgatagttaacgcagaaacttcttgaacccaacctgcaggggctggtttttcgctgagctgccatgctttttgtaatatttgtgattgcacttggctgccagggttattgattaaaatggcggtgtcggccgcttttagcatggcgacatcgttttgactgtcgccaagcgctatcacagtaaatggattgcgataggcttttttgaactgatttaacagccacttttgtgcaagtcctttattgttacctttggttaaatgaataaaacgcccgccaacaagcacttcgtagcctgcttgactcattgcctctatcagaccttgtttctcttcatcactgccagtaaagcaaattgggtctgaatattgacgctttaaagccagttcgcttttatcaacgggtagccctgttagttcggctatttcttgtgcactaaattgactaaataagcgcacacaatggctaaattgactggcatattgtttaagatcttcatgcaatttatcggtgctttgtgtcatcgcaaaacgccaataaccttgatactcatcacagccgatcggctttactttaaaataatctttcgggatataaacggccgcgccattttccacaataaagggttggtgatgatttaaagctttttgaatatcagtgacttctgcaaatgttttgctggtattaaaaatgacattgacaccggtatcattcaacttagccaaaaatggtttgatcacctcacattcgtaactatcgtgatcaagcaatgtgccgtctaaatcagtaaaaataagtggttgagcaatttggtcagcgagtagttccattttggtaatatcacgctcagtatcaagcaacaataaagcatcaacactgtgcgcaagagtggctaagttttcacgcgtaatacgttcaaaatgagagataaaacgctttaaactcacttcatcaaacgtgccctgcccttggccttttttggcaattaacttttgctcttgctctaagcgccaagcatacacatcttcaaatgatggcgcttttaacataatggtgtaatcggccattgcgaatacattttgatattcatttgctaagcagctatttacgcagcgacgccaaatgccgtcggcatcttctagttgttctaattcattaactggagtttgcagttgataaggttgctgaggtgtactggctacacaccagccttcaaaaaacacgatatctacgggcttttggttgctcggccactgggcttgtggcactggatcatcggttagcttatcaaattgaggtaatggcacattcactttacctgccaacaaggccgataaggtttgctccattaattgcgtatcatgcgtacctggtacaccacgactggcaaacaagggatgaacatctttagcaagctcagtgcgtgcatcacgacttaaataaaagtcatcgattgataatgacacactgttaaattcagtattgctattaacccaagtcactaaaaaatcagcgagggttgtttttcctgatccttggcagccgttgatagccaccagcatagattggccggtcatttttgcgctcaagatatcttgcgcgaggggtataaaaaactgctcacttaagtattgatacttgagtggtaactgatgtttcgctaaaaacggggtaatatccacaacatttgcctcttgcataatcgctcctaccagtatgacatagagataaatgcagttagtagaccagttttataactctttattttttatatagttacaaaaaaagcgcgtatttaacgcgcttttttggtgcaatatttaagcagtttttaagttctaatcaacttgttgcactgctttggggaggacagcatttaagataatccctaaaattgcgcataagctcacaccttgcaaactaaactcgtcaccgccgaggtgcatgccaccaataccaaacactaaaatcagtgcgatgatagtcaagtttcgaggcgcggtaaggtcttcacctgattttactaaagtatttaaacctacaacggcaattgagccaaatagtaaaatcatgataccgcccatcacaggaaccggaatagtttgtaaacccgcacccatttttgccacaaatgcgagcacaatcgcgatgatagcagtccaaagcatcactcgagggttgaagttacgcgtaagcatgaccgcccccgttacttcagagtaggttgtattaggtggaccaccaaaaaccgatgccgcagaggttgctaaaccatcacccaataaagtgcgatgtaagcccggtttctttaaatagtctttatccgtgacttggctaattgccatcatgtcgccaatatgttctatagctggcgcaatggccacaggcaccataaataaaatagcttgccacttaaactcagggtaagtaaatgcaggtacagcaaaccagcgagcttcagtaaccgcattaaattccacaatacctataaataacgaagcaagataacctgcgataacaccagcaagaataggaataagtttaaatacacctttaccccataccgcaaaaatcagcgtaaccaataatgataaaccagacacccaaatagcttgttcataaggaactagttgcgcgctgccatcccctgctttacccattgccatattcacagcaacgggcgctaaggctaaaccaatcaccataataactgggccaacaaccacaggaggtaacactttatgcagtgcattcacgcctttaaattttacaatcaagctaagtgcaaaatagcaaaagcctgccaccattaaaccgcccatagttgcaggaataccccacatttgtactgaggcgataataggtgcaataaaagcaaaagacgatgctaaaaagataggaacttggcctttggtaaccacatgaaacagcaaggttcctaggcctgcggtaaataaagccacattgggatcaaggcctgtcagtaacggcacaagtaccagtgcgccaaatgcaacaaacagcatttgcgcgccggttagaattgtttttaacgaaaatgtttgatgattttccacgtgcacgccttacactgtaccaaagatcttgtcaccggcatctcctaagcctgggatgatatagcctttttcgtttaagtgactatctagtgatgccgtgaagatttcaacatctgggtgcgcctcaagggttttttctacaccttcaggtgctgccactagtacaatcactttaatatctttacagcctgcttttttcagcatatcgattgtggcgatcattgaaccacccgttgccagcattgggtcaataacaaggcttaaacgctcatcaattttaccaaccagtttttcaaagtatggcacaggctccaatgtttcttcgttacgctgcaaacctacaacactaacttttgcagcaggtaataattgcataacgccatccatcataccaaggccggcacgtagaataggcacaacagtaatttttttacctttaatgtgctctacattgaggtttgaaccatcccatccagtgatctgcacgctttctaatggtaggttttttgttgcttcgtatgtaagcaaagtacctacttcagacgccagctcacggaaactttttgtgctaataccttgtgcgcgcataaggccaagtttgtgttgaactaacggatgagtaataacatggatagacataagtagaacctaaatgaaataaattacgcctattttagcgcaaaatagtctactcgactgcaaaaattgcatacttactgcattaattcgaacaactggtctaaaattaaacagctgtgtgcaaattttaatttttttgcaacaacacgtacggtcaatatttaagatttaattattttttgggttaagctgtaatgaaaacactcacatttaccttaatactattttgttgcatttccttaccaacccacagtgaaacactcaatattcaaatgatggctgactttatcccccaagatggcggcaatccagaaaatgaagccactacgtttttacttgctgctgccgctgagttaggtgatgaaatcagcctgcactttataccggcaagtcggctaagagaatggcagcagttaagcaaaatgaataatgtttgcttatacaataaattaaaaacccctgaccgtgaggcccaagccgtatttagtcaataccctctgatggcttttcctgctaacaaattggtggtattcaacaagccaaagatccctgattccattaccctgctacaagctattaatgacttcaatttaacaataggcatcatcaagggccgctcatattcagaagaaattgataactttatacgcttagatgatgagcacttttttatgttagaaggggcaaccaatgcacctcggcttggtcagatgctatttcaaaataaaattgatgcagttttagaatatcaaactgtatttaacaatcgctataagcgagcaccgggtctaagtcacattcgctatatcagccttaagccagaaaaagccgcgttgtttggttatattgcctgttcaccgacagaggtcggcaaacaggccgttgcactgttcgacaaagcacttaaaacagaaaaggtacgcacattaattactcagcgtttaatggcgctatttcacgaaggtgaaaacacacaaattgtaaatgccttcaatgcagcgtttgagcactaagccgataaaatctgctccataacccagcttgtatgtagtgcggtttcacctgttgatgggtgtggttgctgggcatgaaaataattcgccatgttttcaacatgatattgttgaatgtgtgctgggttatcaattacaaactgttgtgttccctttgcgttgttaagcacaatgggcttttcatcaaatacactaaagctaagctcaccttcactgccataaatcattacatcatcaaaacgatttgctgaggcaaagttccagcttccggtgccagtgacgccggattcatgctgccagtgcgcggttatggcatcgaatgcagaatataagccttgttgattggcacataaaccatgcaccttattaaaatcacctaaaaggtaggcaagtaaatcaaggccatggctggctaaatcgtcaaagtaaccgcctcgtgctactgtttgatcggtacgccaattatactctccagataagtctaggggattcggcgatttacttaaatgccaacttacatgacgcggcttaccaatggcaccttgttcaagtaactgtttaacttgattaaagcgcggtaacgaacgacgataataagccacaaacagcggctgtttagcttctttaaacactgcgacaatgtcaaggctatcttgataacttggcgcaagtggcttttctatacaacaaggtttacctgccgctgccacctcaagagcaaaccctttatggctatctggcggcgtggcaatatacactgcatcaacactgttatcgtttattagttcacttggcgatgtgtacacctttgctacattatggcgtttagcataatcatgggctttttctaggtcgcggcgtgtcaccccaataagcgcaataccttctgcttgctgataagcagggccgcttttcacttcggttacagcaccacagcctataatggcaaatcgcattggcttattcattgttattcctttgtatttgttaagtacgttgcaaattgctgctgcatgtagccatttatttttgcatgagttgggctccaacctgctaaaaagcgataaaaatcactccatgcgtaacaccatagcgctcgccaactactaacaacatgcacaggatttatactcggttgatagcgttttagtgctagggtaagagtgtcaaaataacgatttaaataatcatctgcaactgattttaatgctgtatcatctaaacaactgcctaaaaaatacatcacatcaatcaccccaacacccttgccaacatattgaaaatcatagccaagaacatgttggttttgtggcgcaatagcaaagttggcaagcttagcatcaccatgaattatcgtttggtaagatgactcactcagcgcagtatcaataggttgcgcctgcgcttttaagcttaaatcgctcatacgctgtaactcatctggccgtgttgctaaatgccaataactacctcgaggccaaagcccctcggatgagcttgctaaatgaaaagcatgaaaatgtgcaagccagtttataattgcttgaatgtggctgtgtgtagcatatgcttgctggtagccatgtgctacgaaatcactaaataataacgcttgcttagtgccctcttgtattgcatcaatacagtgaatagccgcagcttcatggggtaattgctcagcgtaatgccgataccagttaaattcgactaagtacgattggcgctttctggcaagagcaaaatcactttgcgttatacggctatgattaatctggctaggcacttcaatcgctttaattacagtcgctgcaccgttcacttggcaacgaataatctcaccgcacccgctccagactgacgcggcttgctgtaaatttgtaatgtttgaaaagtgagaagtaacaaattgcctaagatccataacgctctatgatttaaaaaacgaatggcaatggtaggtgaaattagctattggcacaacggcccgtaggcaataaaaaacccgtgctaagcacgggttttcgtagataaagtcctaatactgctaaggacttgcattgttgaattactcgtttaccacacttttaagtgggttaactggctttgcattgtcatccagtaagttcatatcaaaatcgaactcatcaacacgaatcgctttctcacgtttcttgttgtagtcaatcagttttgcatactcttcttcgttgataacacttgcaacaagtgcattatcaagagtttctgcaaaacgaacgcccggcttgatagttttagcacgcagtgcttttttaacttttgcaagtaaatcaagacacgccattttcgctttgtacgcttgctcattgatgtaatgaccatcaccttcaattggattaaccaagtgagtgatttgcgctttaaatgccgtatccatttgcgcttgagtcgcaagttcacggattaaatcatcgctgatcttaggcattttctttgagtagttcatagtaatgaaacgcataaacttacgagtaccacttgcagggaagttatctaggaacttatgcaatgcttcttcagcgctttgtagtgcaaagcgagtcgcatagtggaagtaaggcgcagcttgctcacgttcactgctcgctactttctgctcgtagtatttaatcgatgccatcgccgcatacaagaagctcattacgtcacctaaacgtgcagataacatttctgcttgcttaagtttgccgcccagtaccaataacgagaagtcagcgtaaactgcaagttttgcagatagtttgtgtgctgctttttcgtattcacgtacttctggtagtgacgatttagcacccgcagtaaacggtaatacacctaaacggaaagcacgtaagctgttagctacgctgtagcccactgttttacgtaagatactgttgaattctttgtctgcatttttgtcttcgctatggatagactcaaccatagattgcaggtaagggtgacaacgcattacaccttgaccaaaaatcattaggttacgagtaagaatgtttgcaccttcaaccgtgattgcgataggttgagcaacataaccacttgctaatgtattttgcggcccattttgaatcgctttacctgcttgaatatccattgctgaatcaagcacgttgcggccaatttctgtcatgtggtatttagcaatcgcagtgactacagatggttttaagcccatgcctaaaccttctgttgttaatactcgcattgcttcttgaaggtaagttttacctgcgatatcagcaagcttctcttgaataccttcgaattgaccaatcgccagaccaaactgctcacgcactgctgcgtactcagaagcacctttaaatgccacttgtgatgaactaacacctagtgccggtaacgagataccacggccagcacctaaacagctaaccagcatttgccagccacggccgatgttcttttgaccaccaatgatgaagtccattggtacaaatactttttcaccgcgtgtcgtaccgttgtaaaaacggatgcccatagggtcatgacgattaccaagctgaacacctgggtgatctttaggaataagcgcacaggtaatacctaggttttctttaccacctagtaaaccatcagggtcaaccactttaaatgctaaacctaatactgtcgcaataggtgctagagtgatgtagcgtttgtcccaagtaatttctaaacctaaaacttcttcgccattgaattgaccacgtttaacaacaccgatatctggaataccacccgcatctgaacccgcttctgggctagtaagcgcgaaacatggaatatcacgcccatttgcaaggcgtggtaagtagtgatcttgctgctctttagtaccgaagtgtagtaatagctcacctgggcctagagagttaggaaccatcacggttaccgcaaccgcagaactcttagtcgcaatagtcgcaacaattgtagagtttgcataagggctgaactctaaaccgccgaatgatttagggatgataagcgagaaaaagcgctcttttttcaagaaatcaagaatgtagtcaggaagatgtacaccattttgaatttcagaatcatcaatcattgataataattctttaactgggccatctaagaatgcttgttcttcagcgctcagcttagctgctggcacgtcacgaagtgcatcgaagtcaggtttaccttggtagattgaaccttctaaccaaacatcacccgcatctaacgcttcttgttctgtaattgaaatactaggtaatactttttttaattttgtacgtaagctcataataaactcatccgaccagatagtaatacctacattacgtcacaaaatgagcaatagatcaattggtccaaccagtttttttaacatttttttatatttattttttctttgtatgctaagcacttgaatacaatgggtttacacgtgtacgctcaattgcaaatttttatcccgaaatagttaacaactaaagactgagaacaaaaagcccaactaaaaagttgggcttagatacaaatactgaatgaatgatttagagttcatcttctatggggaatagcgaaataaaccaaacctgaaaacgctgccaagatgacgtttgtggttcttcatcaaactgctcattacttactgtgtcgagccaaactaagtcatcatctttaagtgcaactttccaggcatattcgggcatttgcgtatcaacccaatgggctaaaaagcgactaagcttttcgctttcgattaacactcccatctcggtatttaaatcaagtgagcgagggtctagattcatggtacccacaaaaatcctttcatcatcaaaggtcatggtttttgcgtgtaagcttgcttgcgatgaccctgtaactttgcgccctgctttgcgcttaatagccattagatcactgggttttaattcccaaagctttaccccagccttgatgagatcttctcggtattttttataaccagcatgcaccgcggatacatccgtagcagctaaagaattcgttaaaatagtgacatcaatacctttttgagcccaatttgttaacagtttcacacctgaatcgcgaggaataaaatagggtgaaataataattgctctatgcttgggctcacccatttctttaaataatagtggtgacatgtttgcagagcgctcattaacatcattcatcactttatcgggatggtcgtaaaacagcacagatttttgccaatcaaacttaatatcatcattttgaagccgttttacaaactcactttcacgtaattgttctacataattactttgctggttttgctcaacataacttgaaagtgtgtttgtaatatcaaccaaagattgctcatctcgtgaaccatgtaactcttctacagggtaagaaagttgatgattccaatacaaatcaaaggcttttgatgcctctggaacaatctctccagcactcatgacatctaaatcaataaattcagaatgatcttctgccgaaaaataagcattgccaatatttcggccaccagtgataaaaatccgattatcaacaataaaactcttattatgcattcgtcttgacagttgactgtaattacttagaaagccaagcgctttaaaacgacggttaggaaaggggttaaataaacgaacttcaatattaggatgaacagccagtgcagcgaggtctaattcactatctgcttgcgataaatcatcgagtagtaaacgtactcttacaccacgctccgcagcttttaataaaaaagccgtaaataatatagtggtttgctgtctgtggtataaatagtactgcacatcaatggtgtgctctgcagaatcaataagtgccaatctagctacaaaggcatcgaccccatctgctagaggataaaaaccagataatccaggatgattattacccaccgcatctcctatagtactgggtgtatctgctgcaatggcataacttggttgaatagactctcttgaaggtaattgtgcgcaaccagaaatatacaaaaataatacacaaaaaaggagttttgaagagtctagtatcatggcttcctaccattgatttaacgtgagatacacgtgatcgttatactattaccctaataaatgaacggattaaaagcaaataaaaactaatatggagggataaagaagtaaaaagtagtaataaaaaggttttaacggctttaagagcaaatagattaagctacttgctcagtaatatcagcaatttcgattagtttacgattgagaatttttttacaacaaccacaacacttgccgcactgggtacccacctgcagctcttttgataattcacgcatagtcatcgcgccatcatcaattgtttgttcaatttttttgtcagttacaccatggcaaaggcaaatatacatgaatgcaaaccactctcatttctgttgatggaatgcatattaatctaaacggtaatagttcgcaatagtgttatagacaatatttgcataacttttgaactagaactgtctaaatggcacacgcataaaaatttccccttatgttatggacggttagtcaaaggcggggaaagaaaaatttttaaatttttttgtaagatctaatttgctggttgttgtttgtcagtaatgtgggcaagtagttacttaagacgaccgcaccaaaagcataattaaagttaatgattttttagtaattccaaattaacaggcttaataatttagctattaaagcctgcggcaattttgcactacttacccaaacgttgaaccgcaaaagagtccctctaattacactttatgctttgttattgaaaagcataccggagtgattattgctaggcattgaaaatagtgaattgatcatcgaagaaacattgcttttcactgctcgctgaacagcattaacctcatcgtctaactgctcatttaattcttttagttgcacttcacgctgctcaggcgttaactcttcatttgtctctacaatattaattttattttgcagttctttaatcttagcaactaactcttgctgagtgagtggggtatctggttttgtctctgtgtcagaatctacattgttattttgctgattatttttggcatagccgtttgttgcattattggtgtttagatttagatcatttttatttttctggcccacagggtctgacaatacagaagatgaaaatggagtaacttgcatgatattcctaaggttatttttttgacacttttaagctgtgctgtttaaaaagaaattaatgcacaaaacgtacctattaagcatccaaatctttctatttaaagtcttaaggcatactcaagcactcaccttgtacttgtttccccaaagcataatttagttaattgcaaaaactagttataaattactatttgataactttttaataaccttttgtgatcgcttttcaaatctccctcgttcactttgttgtgatggacacgtcgtaacgtccgaacatacaaatatataaggaagaacgatgaaatacttactcttggcaacaagcttgctatttatcacagcatgcagcgatgatgacgacgataaaaccgaagtggttactccacccccagttcaagaattcagcccaagtatgacctactccgttacattgagcggcaagcaagaagtgccgatgaataactcaatgcaaacagcaactgcaacagtagagcttgacgaaagtttaatgcaatttcgcgcaacacttgacgcaagctcagtcgagggctttagcgcagcacatatacatgacggcgacttaggtgctaatggcaatgttgcattcacatttgaagccaccaccgatggtatgtatgaagtcgcaattaccgaccttgatgaaagcttaatcgctgatttaatggatggcgattggtatataaatctacacactgagcagtatgctaatggtgaattacgtgcgcaaattgtgcctgatacaaccagtatcatcacctttgttttaaatggcgatcaacaagtacctatgaacgacagcgacgcaatgggttatggctatgcgtcttacgacagtgccacaacagaattgcgccttcgtgcagtgactatgggtgttgatgacgcaacggcggctcatatccacactggaaaattaggttcaaatggtgatgtttttgttgctctagagcaagatgatgaagtaatgacagattgggtagtcccagaaggtacaacaatcgatagtgataccctagcaatccttttagatggtggtcattatgtcaacgttcatacgccggagtatgccggtggtgaaatccgcggccagatcctaacggataactacgctgttgctacattcgctttaagtggcaatcaagaagtaccaatggtgaacacaatggcaagtggtgatggctatgcattagttgatactaccgactacagtgtcgagcttactgttgtaacctcaggcttagacgatgccagcgctgcgcacattcatacaggtcgtattggtacaaatggcgatgtattagtcgctcttgaacaatcaatggacgacagcaacgtgtggatgacgccaagcaatactcaaatcaatgctgatatttttgcagtactagcttctggaggccattacgtaaatgtccatactccgggtaaccctggtggcgagcttcgcggacaaattcttaccagcaattatatcttcacaacctttaaacttagcggtaagcaagaggtacctgccgttatgagtaacgctagcggcgaagcttatgcattaattaacatggataattacggcttagaactacgtgttagcaccatgggcgttgatgatgcaactggcgctcacattcatacaggccggattggcacaaatggcgatgtattagttgcgcttgagcaatcaagtactgacataggaatgtggatgacaccggaaaacacgcaaattaatgctgatattttcgcagtacttgcttctggtggccattatattaatgttcatacgccagctaacccaggtggcgaaattagaggtcagatcctaacagacaactatcagcttgttactttcccactcagtggaatgcaagaagttcctgctgtcgacactatggcatcaggcagtggttatgcattagtgaacatggataattaccatctagaattaagagcattaactgaaggtgttagtgatgctactgctgcacacattcacactggccgtatcggtatgaatggtgatgtacttgctgcgctagagcagtcaagcgagaacacaaatctgtggcaaacacctgaaaacaccatgatcaatgccgacattttcgcaatacttgcatcaggtggccattacgttaatgtgcatacgcctgctaacccaagtggtgaactgcgtggccaaatccttaccgataactatgtattcgtgaccttcccactaagtggtgaacaacaagttcctgcggtgacaacagatgcctctggcgatggctatgcattagtaaacaccaatgattacagcgttgaattgcaagtacttacatcaggagtaagcgatgcgagcgctgcgcacattcataccggttttgcaggtgaaaatggccctgtgctagctcctcttgagcaagacagtgatgatatgaatcgctggatgagcactacaggcttaatgattaatgctgaaattttctctgttctcgcttcaggaggtcattatgtaaatgtacatactcctgctaatccaaatggagagataagaggccaaattcaataattcccgtgttacagaggccaatagttaattggcctctttatctaattaagcgaaaataagaccctacaattaaaattatactttcaactttattgtaaatagcgaatgtttaattttcttactacctaatctcacaataacacccctcggcatctgaattaataaaccgactgttaaacccagcacgtaagtttgcaattactaactcgacaaagccatctaaacttgaacacgctagtccttttgacaatggacctgcgtatacaagctgttgattttctgaaattagtacagcagccgggtaagcgggtaatagtgccgccactgctgaggttggtttaagctttataactttaacatcttgttcagtagcataatctgtaaggctagcaatatgggcttgggagcgagctgaacagacacagctattatcatcaataatatataaggtattgctgttctttgcgctaagccccatggagatttgaaataatgacagccaatttgggtttgctagttttctatctgggtcaaaaagtgtgatttgttgagagtaggcaatcgataaagcagctacaaccaaggcaatccaaactaggattgccacaatcaccctcttgctacttgaatttggcaataccctgctccatcacatcaatactttcatcaatgagttgcacgcgctcggtaagcttttcgatcatcaggttgtctttggcttgattagcaattaacgcttgtgaattctcggcaatggcacgtgtatttcccgcttggctctgtactacatgcgcaaccgattgagagctgtttgcagcaaggttaacttgctctgtcatttcagtaatttgtagtttcatctgtgagcttatcgctgacagttgctcaatgagtgccacactgccttgcattgatttagttgatgaagcactgttttgcatcaagctttcgagcgtattggttattttatcggtggtatgtttactgcgcgttgccaggtttctgacttcatcagccactaccgcaaagccgcggccttgttcaccagcacgcgcagcttcaatagctgcatttagcgcaagtaagttagtttgctcagcaattgatgaaatctcattaaggagttcagaaatatgactacaagcattcactaactgagaaatattctgatcagcttcttgtaagttgcttgccaactctgctgctttggtatcggtatttgcaacttcttttaatgcgtctgcggcactaacatgcaactgctcaaattgcatttgtaattcattactttcgtgttcaacatgggcaaagccttcagcaacacgctcgcctgattgtgcaatatctatagacaactgctcacgtaacacggcttgctcatgcagctcatcatgaacctcaagcaattgtttagattgatttttaagaacattagtttgacttttcacatcccccacaacccgagataaaaagccaagtaagcgattaaaacccgccacagctttactatggcgctcatctgctcttaggctaatatttatacggttttcatcagccataatttgttctgttgtatcgcttaaagaaagacccgagcttctctcccgatgcagagttttggcaatataacctgccacaaatgcttcaacgatggcatacacagcatgaataagtacagtgctaaaatacagcctgtctggatcgaaaacataaaaaccagactcgtttatctgtaaaaagtaaaagctcaaatggtgaacggcaacaaagacaagcgctgtaataaacactcgccattcaacaaacatgatcaacacggccattaaaataaatatttcaaagtgaacttcaattaggccgtagctttgttggatgtgtaaaaacgaaaacatcatgcaaccggcagccacaacatgggctgttaatttgctcgttgggtattgatggagcatccaaagcggtaaagatagcaataataaaccggttaccacacctgtaattagggtcgaatagataaaacctaaaactaaagattcaacaaacaataaaaggaacaaataagtaaaaaggcggcgcacactcgtcatagataaagccttaattattaaataatatacaaaaatacaattaatcgagccaatacggtttgatgcgcatcacggttcactttattaattgcaataatgctctaaattgatcggtccctgctttttctagccattgaaatatcacactctctgtacaagtaataatagcacccgctgcagatagctgcttaatagctagctttttgtggttttgatttcgagaagcaatggcatcttcaacaacgaatacttgaaaacctgcagccagcaagtctaaacatgtttgcaacacacacacatgtgcctcagttcctgtgaccactacctgagctcgtctatagtcagctaacttgtggttaaaatcattttctaaacaggcgctaaaatgaattttatggtaacaattttctgctgtaataaacggcacgagttcttcactggtatggcctaatttcgaaggattttgttctgtaaataaataggggatcgccagtaacttagcactatttaacaaggtagctgtgtgttgtacaacattagtaaaatcgtcaataacaggggctaatccagcttgctcatcaatgatcagcagcattgcttggctttgttggcatatatatgaatggcgcattacttcctcaaactatgataattattaaagttatagcatagctttctaaatatgaactaagcagacattgttactaaattatcttttcagaaccataaattacgttcataattgtgctatattttgttaaaaattatgcgcaaacactaatttagggttaatcagtcagtgcctaaacgttttctttttgttttcttatttgtcttttccgcgctcattcccactgcgttggcacaaaactatgcactgcaaatccaacgcatttctaccgatgaaggcctaacacaaggtagcgtaactaaaattgttcaagatgatctgggctttatatggattggtacttatcaaggtttaaaccgttatgatggctataaagtaagctcttttgctggtgagtatattctcgatcaacgccaaattacatttctagccaaaacacaaaacggtaaaatatttgtgagtacggagttttctggggctttttttattgatccaaagactctaaaagtcgaaaaaatatattcaggcaaactcaatccagaagatccctacttttcaccgattttagctatcacagaagatgataatttttattattttgcaatctctcagcacgtttactcttacaataagcagtcgaaaaagtttttacatgagttttcaatcaataaagaagaacatattgttcgtgcgctaacaatttacgatagctttttatacatagggacatcgacggggctcttttctaaaaatttagcggatgaccatgtttctcatatcccgctcaccgagaaaaaaaatatcaccgaagataatagaaacgtcaaacttcttcatgttgaccctcaactaggcttactcgttggtacagttgaaggaatgtatgacattccctttaacgctaatcgtttacttgcatttgaaaaggtcaatctcttaattcctcagttaaatatttgggactattctgcaagttcatttggtgaatatattgtcaccgaaaaaggattgtatgagttcaaccgtgaatctttagctatcgactttatcctaagcttcgaccaaagtaagtttttgatgactgataacaccatacctgatgtgatggttgataaaactggcttgctttggcttgcttcgcgctcgcaaggggtgtttacatggtcaacactagcaaggcggtttaagcatattgagttaaaaacacctcaatatagctataacaataatgtatggaccgtattacaagaagatgatgtggtgtggataggcactgataatggccttataaagtataaccaaaacaacaaagagctaacgccctatttagtaagcaatgatgaaaaagctttccatggtgaacatgggatttatggaatagctaaagccgaacttaatggcaataaccgctttttatggttaatgaagtacatagggcttggcctatttgataaacaaacaggcaagcttgtgcaactaaacggtgacccagaaacaatcgaggcgcttaccaaaacgcctaattggggttttcataccatgggaccagaccagtttgcatttgtagatgaagaaaatttttacaaatacaatggtaagtcaggtgagcttagccctataaaaggattaaaagaacagctagaggccgcgaacacttacacttttttaaaacctctatcaactcaccctgacgagtacctaatcagtatgtctagtaagctgtttaggtataatgaaagcacgcaaaagctcacgcttgtctacgaggctacaaactttaatccattagcttttgcgactatccatgattgggtgattgattataacaatatactttggctcgcctcttctgatgaagggttaataggtattgatgcagatacatacgaaataaaacaccgcattaatcgtcaatcaggtttaaaagctaaatcagtattcggtcttcaaattgatcgtttcggctttttatggatgagtacacaaaatggtctatatcgtttagatttgagttcacttgcgctcgatagctattttataagagatggtctggctgttaatgagtttaatttcgacgcagatacgactttcgataacggtgagattgcttttggctctacccgtggtgtacttatcgcagctcccgaagacttcttatcatctgctgtagaaataggtaacatcacgaccgaaataacggatgtatcattactatcgcgagagctcaattatcatccttacaagtatgtaaactcaccattgcagatcacctcagaagatatgggcttaggtgtgagtttttctaattttgataccattaataaagataagacactgtataaggttacgctggatggcccaacatcgttgcaatacgataaattaaagaccaatgaagttttcttcacaaaattacctcccggtgattacgttttatcgatttcgtcttcatcagaaatgagtgaggctatttcagcaacaaggcaactgcgctttaatgtcgctcacgccccttggacatcccccatagcaaagacctcatatggcgtaattatttttacaatattactgatcatcttttggcaatatcgagctcgccaacaagcgatcagtcgtgctcatgttgaggttttaaaatcacaacaacaaacagagcttgccttaagcagtaacaaaagtggcgtatgggagatcaatctagacaatgacatactctacaccaaccgtttttcggctgaacttggctataatgagttcaaagaccgcatagcgattaaagactttattgccttaattcacccacacgatcgcaattatgttatcaataaatggcagttgttcttaaaagaagccaacaaacaacagtggaatattacctatcgtttaaaacataataatggcgattggctttggtatgaagatgttggccgggtagtagaaacgaatgagacaggcggccccttaaaggttgcgggcttttacactaatatcaccgaacaaagagctaatgcccagcaagcaagtgtacttggggaagcctttagtcaaattaatgattggctgcttattttagataatacactcatgcctttttctgcaaacgccagttttagcgaaacattcgcaacaccagcaaatattgctgacttaacaacgagagactttatcaacgcgataggtcgaactaaatactttgaatatgtaagtattttaaaaacactcaaacccaagcaaaactggaaaacagaagcctttattcgcaccttaaaaaatgcttcgcatccagtgcatattagtgtcacagcggttgctaaagacagtcaaacgattaactattacgtcatcgtgatttctgacttaacggaacaaaaacgcgctgaggatgagttaagatatttagcaaattacgactctttgactgggctaccaaaccgtaccttaatgtatgcaaaaatcaatagcagcattaatcgcgctaaaaagcacaataagttagccgctttgttattcattgatttagataaatttaaacctgtaaatgactcatttggtcatgctgtcggcgaccaactgttatgtaatgtaacacaacgagttaaacagatactgccacaaagtgcgctcgttggccgtcaaagtggtgacgaatttttagtgcttgttaaagatttacaatctcctcaagcattgagtgagctagttaaaaagctcaccaaagagcttgccaataaagtaatcattgatgatttttctatcaatatatcagcaagtatcggcgtagcactttacccattcgatgcaaaaacagcagatgatctcattcgaaattcagatattgctatgatgcatgccaaacaatctggcagaaataactttaaatactttactgagcaaatgaataaccagttaactaaaaagttattgctagaaaatgcgttaaaagacgcattcaaagacgatattttattcaacaattatcaacctattgtcaatgcaaacacgaaaaccattaatggtgcagaacttctaatgcgctggaagaccgtacaaggttatgtgtctcctgcagagttcattcctattgccgaagaaattggtttgattgatttaatgaccgagcaagcacttgaccgagcactgacagagctaaaacctatactgcgtgccaacccaaaattttacttgtctttgaacttgtcgcccacccatattctaaagtcaaacttaactgaacgtttgctaatgatcctcaacaatcatctagttaaacctattcagctgcgtcttgaaatcacagaaaacacgctactcgaagacaaagacaaagcatcaaaacaactgcaaaaactcaaaaatgcaggctttaagttgttacttgatgacttcggaactggttactcgtcactaacctatttaaaccaattcccgatagatgtcataaaaattgaccaaagtttcgtacgtaacattggttctgataacagtaatgaatcaatcattaagaccattcacgccttatccgtgaacctaggcttgtattgtatcgccgaaggtgttgaaacacttgagcagattaactttttacgcaatatgggttgtgatgatttacaaggctattactttgcaaagccaatggaagctgaagatctaatcaaagaaagtaccattcaagctattgtagatcgtttaaacgagttgtaagccacttatttaaacactgataaagctcatctttgtttattggtttagatataaagtcatccattcccgcgaccaagcaacgcttttgatcttcttcaaacgcatttgcagtgatagcaataatgactgcatcaccataacgttcagggttttgttttattttttgagtacattggtaaccatccatatttggcatctgacaatccattagaatgatatctacatcagacttttctaagtgcgcaagcgcttcaataccatcattagcttgatgcaatgaacacgaggtatctaacatcatttttttaaggacaatttgatttataggattatcttcaacaattaaaacttggatcccttttaaatcaggtttttgtacattttggctttgcattacttttgcgtcactttgcacaataggcactttaattgtaaattcactaccttggccttgttgactttccagtgataacgtaccgctcatcaactccacaatacgctggctgattgttaagcctaaacccgttccaccgtatttacgggtagttgaaatatctgcttgggtaaattcattaaatagtttagcttgctgctcagctgaaataccaataccggtatcacgcactcgaataactaaatacggctcttcaatagtacagtttaatgaaatttcaccagtttctgtaaacttacccgcattactcaaaatattattaacgacttggctaaaccttaatggatctaaactaatataatttggaatgtcgtctgcaatagacaagctgaactttactgtcggcttaacacttgtattgctaaacaccttggcgagttgactaagcaaagctttgatttcaacagcccgatactctaatttaagcgccccagcttcaatttttgaaaagtctaaaatgtcatttaaaatcagcagtaaattactagcactttgatgtatcatcgccaactcttcacgctcagtctcaggtaaggtttggttatctaacaacagttgcgtcatccctaaaatgccgttgagtggggtacgtatttcatgactcatatttgctaaaaactgtgacttagttctattagcctgattggcaagccttaccgcttcaacaagctcattcgttttatcatttacttgctgctcgagtttggcgttaaagtcttgtaatttattattaagctgttcattttcgtgattagcgtgatgtaagcgactaaagctcaaggcaagcttatttgccaaactcgaaaactgagcctgcaatcgacttacttctaaccatgtttcgggtaagtgagctttggtaattgcattttcaggatcaaacttatctatttgctctgccaactttaatattggcgtagtaagccagcggctaagttgagtgatgaaaatactggtcagtaagataataaaaataatcatcacaatagattgcccccatgcactgaccgcaacgtcatttgcataacgacgattaagcatggttacaaccaaccaattatgctcacttgaacgcgcctcacgagcataaaattgttgctcattttcaatattaaacattttaaagcgtgtatcatcggaaaaggttgttagttcatcagttgtcagttgctgtagctcagtaaaatcatctaaagtgctataaacaaccttgtttgatacatcaagtattaataactcaccttcgtgcgtaaacaaacttggtcgcaagccagcaaaataatcaaacatcagtgaaccttctacaacaccagaaaacatcccatcggtgtatattggcgcagatacagccactataggtaaagagccaaatccccggcctttaaagattgttgatatgtagccgttgtgattgttaggggcgttaatgaaatagtctctatctgcaacattggcgcgaatattagattgctgtaggctgacagctaatgacttaggataaaaatgtgtaacatcagcaagcgcatcaacgatgatttgtgtcctaaaaccagggtataaatgcgccatgttttcgagggcaatttgcttaggaacaccactagcaatactttttgcagttagaacaacccccttcttgtgatgatcaagatgcgcatcaatattacgtgtgatctccttagctttttcttttaattgggcatttatctcatactcaatccgtgcatagtgattgttggttaatactattgaggtcaaaataacaactaacacaacgagtagggtaacaacgtaatttaaaattttataaagagacgagtaatgtttatgccaagagtaacggctgaaaaagaaacttaataagtcgataaccgaaagataaatcgcggcatttaagcaatatttagccaacgcaattgcgatagttagaataggaagagctaagaagaagtgcccaaaggcccacaatgcaggtaaccctaaagcaaaccaaaacatcatccctctgagaaaaaccggctttgctttagataaacaaactatctgcagataaattaattcgagtgcaaaaacaatggacggccatgcatgaccccatcgataaaagataaatccagtgctcaaaataaaggtgataactgcaaatcgccagcctaaaagcaataagcttaagataacgaaaagctgaccgagtaaaaattcagagctatctagaaaccaaataggcagtaaattaacaacacctgcgatgcatcctaaaagcaccgcagtcataaagttaaaatatactggtttatttttaagcaaaggcgctattccactaatatgttctacctttaacttaaaagaaaaattaacattttaccaatttaattaacatggtgacattcatgactttctacctgcaaaacacttttttcgatattaaagcgcacacgtaggagcgtctcaatttttaagcgacacgcctcatcatgcttttcaacagtacaatggcgctttaagaccacgtgcgcaccaaccacgatgtctttgtcatggcgtaccactgtaacattatgaacattttgtacatgctcaactgaggcaatactttgctctatctctgatacatctggaagtttacttttgttttccataagtcctttgatacagcgggtaattacttttactcccgtgaacaaaacaaaggaagcgatcaacatacttgagatgatatcgatttcaggccagccagttaaatgaattaaaatacctgcaaagaaagtagaaactgtagagattaagtcaaaaaatgagtgcaaaaataccgcatacacattaatactggctttacgtcctttatacagaacccatgcagcagcaccatgaaataagaagccaatcgctgaaatcacagacattaaatagctattaatctgtaaatcatgtccatcagaatggtgtaaaaaccgctctcccccttcaaataagatgatcacactaatgctcagatacaaaatgccattgattaggccccctgtcagttcagcacgctggtaaccatcgttataattttttgcaaaatgaatcgccatgcttgaagcgatcaaagcaataaataaagagctgttatgaacaaataaatgcccagcatcggcaagtacagcaagcgagtttgaaaagtaggcaccgatgatttgaataaccataaacgagcatgttattgctaaggcaattaacaagcggcgtctagatgcttggtgcgtagtaatatctgtcatgaagaagtgaaaaacctattcgctgtataaagaaatgatataaagtagcaattgtaatacgagaagcacttaaacgcactaaaaacttaggtacttagccctttttgaaagttatttgcgcaattcataagttaaaaagagttcaacctacagaagagagtaaagcgttaacaacgaaatggttaacacttatgacaatgacaaatcacaccttaaattggctcactaaatctttaaggtgctgtgcacgcgataataagctttgcgtaccacgttgttgttgctctgcgttatcatgaatttgtgttgcactgtctgaaatatcatgtgccgactgattgatatgttcaacgactgtgccctgctcctcagtcgcagcagcaacttgatgattaccttgactaataacttcaaacttttgctgaatagattgcaacgcagacactgcaatatgtgtcagctcagtcaccttttgactactttgagtaccttcagctatcgcttcttgtgattgcaatgaagaactttgtaaacgtgatacctgctctcttatttctgatgtcgacttttgagtacgttgtgcaagtgaacgcacctcatctgcaacaacagcaaaaccacgcccctgttcacctgctctggcggcttctatagcagcattgagcgccaacagattagtttgttccgaaatagcattgatcacttcaacaactgagttaatttctgcagcctgattggcaaattcgccgatactcttatcaaccgtgagcagaatgtcgttaagttcattcatagtttgagcggtcgcagccatgctttgattcgttgcaacggtttcttttacggcctcttcggtgtcgttagcagtacgatgggcgatatcagacacttcattgatcgtttgtcccatttctgtgatagctgtcgcaacttgatcggtctgggctcgttggtcatcagttgcggtaaatgtcttgtttgcaaaacttgctagctcatcaatgccttcacgcatggcttgctctgtaacactgatttcatcaacgagctcagcgactttgcctataattgcgttaaatcccttagcaagatgacccaattcgttatcaacgctatcgtccaaacgctttgttaagtcaccaccgtggccggccataccgagcagttcgtctcccacaccgcgtattttcttacttaaccaattcgcaaaatacagagtcagtaccaaaaagataacagcaagcacaacgctaacaacaatagatatccaaacaaccttattaatcgcactggaaatctcttgctttggctgtatcgcaactaaggtcaaacctgtcccctcaattggcataaccccagcgtaaacatcttcaccactcagttctacttgcgataatataaaaccatcatgttggtttttcattagctgctgcaatgtgctcaatgaacttacatctgaaactggtttgccaatgtaggcatcatttgcatgggcaataatgcgcttactatcgtcaattaaaaataagtaaccttgctcgcctattttgcgcgacgtgacaatactagaaatatctgaaatatcatatccaagcccagcaacaccaagacgttgccctgctatttcaaccaaagtatttacatatagagtcaggtgtccaccttgttcactgacatctaatgcgagcgcttggcgtttatctgagcggatgaaatcaaaaaaccaactgtctcttggctcactttgtgagattgatttaaaaaagccatcttgtgtgtaataactcatcgagtttttactcacccaaaacaccgatgatgcaccactctttttttgtaaatcagcaaagtaagccattacgcgttgatggataggcgagtttttctcaccttcggtcatccacgtatgcagaatttggtttcctgccaatgattttgaaacagagatggggtaacgcatctgtgcatcaatttcagcagcaactttacccacagcatcaggcagaagctgttgttcagtttgttgataataaagccctgaaaattggctggtgttgattaaagcactaaccacagtgacaacaaatagtgcaattaatacaaaactaataaaaatagtccgcagcgatagatttcgcatgtggcaaacctcatactttaatggtggatttttaggttagaggccatccttgcgtcttatttgcaattttagataacaagtcaatgttaagcaattgcaatttaagcttttattattgttttaagttaaatgactatcaaactcaagcacaccattaacagattccacgctgcttctctcctactctaaaagtctcactaaattaacgctgattgtcgtaaatactttgactctaaggttcggtgattattgttattttttgtttatatgctttaggtgacatgccgtaccagcgattaaatgcatgatgaaatgcactaacctctgaatagccacacaaaaaagcaatttctgttagtgataagtctgtttcgcttataagcgaagtacttttttgttgtcgaagtttggttaattcttgactaaaagtcgtgccttcttttgcaaggcgcctttgcagcgttttctcgctcacatttagtgcgtgcgccattacactgcaactaacttgtccttgggttaaatgctcttccagtaaaatgcgcaaaatatctgtgacattggtttgtgttgtgattttaatttgacctgacacaactgactggctttctactaattcactaaaaaataagctatgggttttagcgccatattcaattgggcagttaaaatgttcattaatttcggcattaggctctttacgttgtaaataaactcgacttggacaccagtcctttccctttactgttcgcgctatttttaaacaaaatgccattggcgcttcatagctaagtaaggacatatcgcgttcaccatcgttaaagttaaatcgcaactcatactcgttaccatgatcaattaacgacacattatgggtatctcccatcagtttttgatagcgtaaaatcagtcgaaatgcactcagcaaatgtgttgcttgaatgatggccataccaacgacaggaatagcacgcacattcatattactgcctacatacaaccccaaatgcgtatcgggcaataaagcctgtgcttgtttccatagtgtactgacattagcctgtggataccgtgctgtttgactgctcaaatcggctaacggaatattagcttgtgcaaataactcattaatcggcaaaccttgccacttaaatgactcagccatagccctaagccaccagcttgatagggtgcgcatacatgtcctgcaaaaacaattcaatgacccatattatcaagtaaaataataaataaaagcctattgtttacctgtaattaacaaaggagacaacaatatgggcactgtagcaagtaaacgcgagttcgcgagctttaaagagttttacccctactacttacaagaacacaaaaataaagtctgtcgtcgcttacatttctttggcagttggttagttttggcaattttgtttgccgctatttatcaacagcaatatagctggctaattctatgcccacttgtgggttatggctttgcttgggtggggcatttcttttttgagaaaaatcgcccagcgacctttacgcacccattttatagcttcataggcgattgggtgatgtttaaagacattattattcgtaaagtgccattttaggaagctatcatgaccataaaaaacacagtatcagagcaagaatggcaagcccgtgttgagcttgctgccgcatatcgattggttgcattgtatggctgggatgatttgatttttacccatatttctatgcgtgtaccagacactgaaaacgaatttttgatcaatccttacggcatgatgtttcacgaaatcactgcatctagtcttatcaaggtagaccaacaatgtaataagctgcacgacagtgaatacccggtcaatcctgcgggatttaatattcacagttgcattcatatggcgcgcaatgatgcccattgcgttattcatactcattcactgaatggcacagctgtgtcagctaataaagatggtttactaccaatttcacaacaggctgtcgtggtgcattcagggttaagctatcacgactatgaaggcattgcgctaaatcccgctgagcaagaccgattagttaatgatttaggtagtaacaactttttaatgctgcgcaatcatggcctattaacagtaggtaaaactgttgctgatgcatttttatttatgtacgtatttgaagcagcgtgtgctgtgcaaacccgtacgtcacaaaacaccgagcaactcgtgcaagtgccaagcgctatcattgatgggattaaagggcaaacagaaatagcaactaaagggctaggtggtgcaatcgcatggcctgcgttactgcgtttattggacaataagagccccggatatgatcaataaggattacctatgcaagtagatatcatgactaaagtagtgctgcctttagcactatttatcatcatgtttggcatgggcttagggcttaaaaagaaagactttggggctttgtttatcagccccaaagcgctcagtatcggtctaagctgccaactgttattactgccttgtgtggcgtttctactagctgtaagttttaacttaccagcagagctggcgataggcttgattttagtagcctgttgtcctggaggagtgacctctaatttatacacatacttatttaagggtgatgttgccctttcaattagtttaacaacaatagcaacctttatatcgccatttacactgccaataattatgcattttgcaatggaaatgtttagcgttccaggacacgaattccagttacctatcgtaaaaacaattgtgcaaatgttagtcatcaccctactaccattgagtttgggaatgctgtttaatcattatcgctcacacataagtaaaaaacttgagcctcttactcgcagtttttctagtatttttttaatcgttattgtcattgcaataattcataaaaattcagagcaaatgattggcttcttcgccagtagcggtatcgcaacattcacactaaacgtgagtaccttattacttggactcttaattgctaaaatgtcggggttatcaaacaaacaacaaatgagtattgccgtagaggttggcttgcaaaatggcacactggcgattttaattgccagcactttaatgaataaccctacaattgctattccaggggcaacttacagcttatttatgttcgtaacggggtatgctttttgtgctctattcaagttacaaaataacagacaagcgctacaacttattaaagacaagccataacaatcacacctatttccgaccaaaaaaaacaaccttaaaactaaagcatgccaaggacttacttggcgctttttacatttgtaatcgttcttgtacatcggctttttttgggtcaatatctctgtatggctgtttttatagggacatagtgtggccaaatataacgatactcaattaccaattcataccgccgagttaaagctagcgctcgacaacttacctgcgtatgtgtacatcaaagatgattactcacgatatgtttatgcaaacaaattaacgttaaacctattagcatgtaatgaatcagagctgctttttaaaaccgatatggatctatttccgcaaagtactgcagaaaaactattaaacatcgatgcgcgtgttcttagtggagagcgcactcgtgaagaaattgaacttactttatcaaaaggagagaaaagtattttctgggaggtaaaatcccccatcttttccgattcggatcctaataaagtcattggcatattgggaatttcaaccgatataaccgaacgaaaagaacttgaacaacaactcctatacgatgcctccacagacccattaaccgatttattaaaccgacgttatttcttccttcgcctcgctctcgcgctacaattaagtaaaagcaagcaaacttacggtgctgttatctttatcgacctcaataaatttaaaaagctaaatgatatgtatggccataatgttggcgacgattacttaatagaaatttcaaagcgaatgaaaaccactatgcgtgataacgactgtatagcgcgtctaggaggagatgaatttgttattcttttagaaggacttggccgtgaagagcaacatgcaaaagacaatgcgcgtagagttgcccataagatccaatcagcaatagaggtcgaatttagacaccctcatgttacgtattacggttcggctagtgttggggttaccatgttttatggtaataccaaaagtgctgaagaagtcgttgctcaagctgatcaaagcatgtatctcataaaacactctcttaacaaacggattgattgctagcctattagcaaaaagagcttagctagagatgtgtaatgaatagcataaaccataaacaccacctcattaatacaataaggtggtgttactcgctaatttttatctagttataggcccagatgacagagtttttcatagtgccatgttttgcttttacccgtttgtgactccaggccaacaccggcattttgctgtaatgaaaaaacgttaatttaccaaagctttacatacttctttttaaaaaatgggatctattaactgtattttttatattgcaaaatgatggcagcacttatcctgtagtgataatctcaatatttggtaaaaacattaaccgtatctaaggaaagtacatggatccagtatcacaaattctcgacttacttttgaatgtcgaaacctttattcttatttttgtattagtgctactaaaaagcagcgttaaattcgtgccacaaaaccgcgcttggcttatagagcgatttggtaaatatcattcaaccaaagaagcgggcttaaactttattgtgccatttatcgaccgtattgcagcagaccgaagtttaaaagagcaagcacaagatgtgccttctcagtcagctatcactaaagataatatctcacttatcgtcgatggcgtactgtatttccgagtacttgatccttataaagcaacctatggtgttgatgattatgtatttgccgttactcagctatcgcaaacaaccatgcgttcagagcttggtaaaatggagctagataaaacctttgaagaacgtgacatgttaaacaccaacatagttagcgctattaaccaagcttctgagccatggggtattcaagttttacgttacgagattgtatacccccaaacacaactaccacttcagtctaaaataaaactattagatagctttttctcgataaatagatttttttgtgcttttaaatatttaatgtatactcctaaataatacctatttaccacttcgtttagggagaaggaaatctcaaacttaacgctaaaagcgactattgctcccaacaatgttaagccatttgaaagtcgtgtagtcatatcatcccgagggattctttccagtcatgtggaatatttggctaaatacaggaacaaaagcaaatcttggcgtaaccagtcatgtaatgctgttgttaagttcttagattactcagaagcatatgaccataaatttagaaatcctcgtttaatgtttgaagcttttgctgaaacacttattgatggaactatattagaagacggtagtgatccaacccatctttggtgggaaccattacaaccagcgacagctaacgccataattaagcacattacaaagttcagcgacttcatctacagtaaaacaaaagacgaacgtcacttacttaatccggatgttcacgcaacaagaagtgagtttttactttctctagcggcctatcatcatcgaaagaacaattcactccttgctcatacgtttgatgaccaagcggcgctagaaaaagcaaaacgcaacaagttggtgaaattgcaccatacgataaaacaaaaagatgttaaggccactgaagaagacgtaatcatagatttgataacaaatggtttttggcgcactaaaaacagaaacgatttaactaatttaaacattaagaatgtgcttattagcatgttaattagttatggtgggctgagggtaagtgagccattccatatattcataagcgatatttacgatgacccaacggatgactcacagtgctttataaatattcagcaccctgcacttggcgaagcacctgaatattggcgtaaacacaatggaaataagaatgcgactagagatgcttacttgcgaaaaaaatatggtttgcgaccacggactgagctactaaacacgtttggtgcaggttggaaatctcgtcatataacttcattcaacgtctatttgtttccgagtacagcagcacgctggttcaaaatgctagttgacctttacattagagagcaacgagtaacatccccgacgcatccacacccatatttgttttcagatgaaaatggaaaacctgcaacaattaagcaatacacagcagctcgacaaaaggccctgagaaagttgggttatgacccttcaaaatatgctggcaataatccgcatggaggaaggcacttcttcggaagcacgttaaaggctaagggagttaacgctatacacattaaagaggctatgcatcatagcagcatcaagtcacaggaaacctacgtcgaagctgaactaaaaaaggaaatgagggctgagatgcttaaactggagtctaaaggtgtagagtcggtatcgatgcaaaaatcatcagatgctcaagatttttttaatgacattagttcattgagctttgaataaagtttttttgcgtaataaaggcattagaaaacgcgcataagtttaaattttacaagcaattaggattcattagaaggaattatgctagcatgttagcactggcattttcaatgatgtggctaccaatgtggtttggctaatttttgagccgcaaagatcaacagcccctagtaaaacattaagagctccatcgttcaaagttgaacttgattggaagaatctgaaatcggtgtatacaagatcagacgtacaaaaacattaatcacatcaactcgttaaaagattagcgaatgatatataaattataaaaagggttatctagttggcaaaaaaattttatacctatcaagaggctatgcttaaagtgcatgatgcagggattaaaacaggtaaagaatatgatgctttgcaaaaaacggatcctagacttccctcgactccaaggaagagctataaggaatatgataatgctgagttttttggtaaagaaacgttctacacatatcaagaagccatgagcaaagcgcgagatgctggtattaaaacaaaagccgattatagagagtggcagaagtcagaccctcgccttccttcaactccaaatcgacattactatgaatatgatgcagttgaattttttggtaaaaaaactttctactcatatgatgaagcaataagtatagtgcaaaactcaggggttaacggtatatcagagtatcgaaagttgcgaaaatctcaccctcgcctaccatcaaaccctcaaataacatatcctgaatatgacaatataaaatttttcgctaaagtaggtttttatacttacaaagaagctattcgtaaagttcatgatgcagggatcaaatcctcaagagaataccaaaattggcaaaaatcagatccgcgccttcctgcaactccttcgaagtattacgatgagtacgacactctagagttctttggtagccaagcgcactatacttatcaagaagccatcctcaaagtgagaggtgcaggggtcaaaacgactgttgaatacgcagaatggcaaaaaaaagatcctcgccttccttcaactccacagcaattttacgagcagtacgatcattcagagttttttggcaaagagtcgttcttcacctatgaagaaacaaaatgccaagtgcataatgcgggcattaaaacatatgctgaatatgaacaatggcaaagaatggattcgcgtcttccttccaatcctcgtcgattctatgaagagttcaaaagtgaagatttctttgttaaagagacgttctacacatatcaagaagccttgagagaagttagaaatgcgggaattacaacagttgcccaatacgatcaatggcaaagaagtgaccctcgcctaccttcgaatcctcgtacatactacaacgagtacgacaatgcagagttctttggtaaaacaggcttttatacttaccaagaaaccatgctgaaagtccacagagctggaattaaaacaactactcaatacgaccaatggcaaaaaagtgacccacgccttccttcaaatcctcgggattattacgatgaatatgtgcgtagtaagttttttgccagagagctttccattgaagagttcgtgaaaaaaataagaaaaaaaggaatcattaaaaaaagggaatacgatgagcaactagcgggtacttcagtgatgtatcccaatgatcctgttaaatattatggtgttgattcatttaaatcgctgattggttttgaatactgggggctagaaaaaacatgtgagtacataaaggcccataaaattaaaacatcttacgaatacatggagcacgccaaaattgtccccaacttacgctcacaccccaataaaatagttgggtttgtaggtgaactacactattaccgaccctcaacatttgaggtttttttggagcaaaatcctagttttaaaccttggtgtgatgttgctgatgcttatttggctaacggcagcagtatatcaaaacgtacttccattgttgcaaagtttcttggctggctagctgacaataatattaatggagatcctcttacttttttaattaacacatcgatttatcctaattttaatctattcttggcgatgctatctaaaaaagagcaatcaacaaatacaattagcatcgttaacgatttcataaatttaattttaagaacatattgtactgacgaagacgaagaaacgggtgaaattttttggcacccagattatcgaaatccttattccaatcacacactgaatggagaagccaataaatcgcggcctaatgaaacagttaagaagatcttaccctttgctcacgtagataaagcgagggagttcttatgtcctgatactgcaaccagctttaatgaattgatcgcggcgcatgatatatatcaagcggattactttgaggttcaagagtctcaaatagataagaatgatccaaactgtgtctggcgtacccgagaggtttatcgcgagagcggtcgaacaaaaacatttatttatgaaatgtggtcaccagttcgaaccgttgccatgctatcgttatttgaattgccattacgtggtcaacaaatactttggaacgattcgggtgagtgggatgaagagttgccaaattatagaaatggacagttgacttgggagaagaattcaagaaaagtgcaaaaccactttaaaaacccccaagggtttattaaaaaatacgatgaaaactcgtttggtttttattgtacaacgaacaagagcaaaaacgtagaagggggctatgctgctccttatatgcctgaaaatctggcaaagtggctaatcttattgcgtgactggcagatgaaatacaaccctatctctgctccaacaaaatggtcaaacgattttattccagcggcgagtcgtgtttccaaaactcgattgagacgaagagggtatgaaggtcagcaatgtttcttatttagagatcctaccgccaaaaatgatgttcttcgctcaaggcctttaaaccgttcagcattcaaaaatgggctaccgatcttgttgtatcatatccaagatgagcaaataagcttagcaaagtttgactgcactcctagaagagataattcaaagatgaaaacgatgaatcgttacagctctgaatatactcctcatagtttacgagcaagcatcattactgcctacttggttgatcataagctgtcacctgtattagtttctaagctggttgggcatgctagcctagtcatgacaatttattatgcaaaagtgactgcgccggctatgaagcgcgaatttgaacgtgctgagtttgaggcactgaaaaacaagcagaactcaattaacgatgcagtcatggctgctaagtttgaaaacttaaaggcgtcttatgttgataatacaaatggggaatttcttgcaaagctagaaggtgtaactggaaatgctatcgttgataaaggatgtggtatctgtcccttaggcggccagagttgtcatgaaggcggcgagcttgttgctgagaaatcgacataccgaagtcccgttccaacgtcgttggttttaggacgaagtaactgtgttcgctgccgattctttataacctctccagtttatctgccggggctaaaagcgctatttgattctattgcactgagtattcgagatttaaacgatagaattgaagaagtcagtgaacagctagaaaacctcaaagatgaacgcgatgaatgcgaatttgctggacaaagtttcacgaaaacatttgagcttaaccgcttgcaatcggtatatgaaacatctgtagcctctctcgatggcgcaatgtccgatgctattgctacttatcgcttaagtgatgcggtaatacagttgttgaacgatgaagctcctaatgaaaacgataaaaagcttcctatggtgctcaatgattcaacactctcgattgaactacgtgaatcttcgaagtttgaacagctacatgagatttgtcagtacgcagacttgtttatgttttcagaccctaaagcagctgtaatggagcgaacgcaaaagattaacaaaatgcttttggaaaacaacatttcagcaagcttatatagtctaactattgaacaacagaaattgattggaaaccatctaataaacaatttggtcagacgcttggggggatggaatgaactagacaacgtcgctgaaaaacgtactaaactgcgagactatttaccagcggcggagttaaagtcattaacaactgaaataaaaaatatatctaacagcataccgataagaaatgtagccttacctgagggagaaccttctctatgaatactgatgttcaagaactgtatgacgatcttatagcggattgtaaacgcaaagacgcacgagataagttatgtattcttaagtctgtactggatgagcaagttgacaataacgtaacggtatttagcctgaaatacgtcgctaaactttcggaagaacgtggtggtcctgcttatcaaaccatcattaataaatcaggtaaacgctacaagacgttgtttgataagtatattgaaatttatgaagataagcgtgaaaagccgcctattgaagataagaacagttggattgataaaattgaggatacggcttcacaatatcgaattaaacgtatgcagtcagagctgaaaaaactcaagtctgaaaatgatttgcttaggcaagtaaagtcggaggtggtgataaagctagataactttgatggtggaattgaagctattgataatcaaacgaagcaaattacggcgtcacctattaatcttcttacctctgagcttgagacattaaaacaactccttgatgaaggatatttacgtcgaaacaatcttaactataacgaaaaaggagctctcttatacacttcggaaagtggtgagattgtccaaatatcagatcgtcgtttggacagtgcacttaataaagtactaactgtgcatagtgatagtaattagtatggctaacggacaacaaaaagctcagcaaacactagaagcttttgagctgtgggtttcgactcaatccaatgacgatttcactcagctaatctacagagggcaactcaatcgcggcgaaatagctaaagccatcggttgtggtaaatctgctcttaaccagaacccagcgcttaaaacagcccttggcaacttggaagataggcttcgcgaggaaggtgtgttacctcccttaacaataagggcaaaagaagaatcagataaacccaagcaatacgacaacactactcataaaaaacaccttgagtcgaaaaggctatcggctattgaagccgagaatattgaactgaaagctaaaattaaagagttagaatctaagcttgagcgctttggtgagttatcggacaccctatatgaaatggggtttatgcctcgatgaatacagagtattttcgtgtaactagcataaggtttcatagcaataaacatgtgattttcatgggcatcccgctcaaaaagaatagctataaaatgcacagcggtaagtacacggtttcagttaaagcatgccctgatagcctccctgtgagtccggccattggtcaacactgggaagttaaaggtgtaaaaaccttcagtgagtatgagaacaatggctatgtcatgacacagcatgtttttgactctccaattgaagcaaaatgctctcttcctgaaattggcgaacaactcatcaggtttatagccaacgaaaaagactttattggtatcggtgaaagtaaagccagacggttgtggaatgccttggggagtgactttcatcatcttgctaagaaagacacaacagagtcgagaagtcgacttagcggccttctgagcgaagagtccatcaacgcactttataaaggctatgccaagtatgctaatttaagtgcgtgtaactggatgtcaaatcaccatataccttcttctattcaacagcgtttgcttaagcatcataacgacaaatccatcaccgccattaaggaaaatccgtatctattgatcggttttggtatgtcatttgaggatgcagataaactcgctgttaccatactcgaccgtgacgaagatgaacccaaacgcctaagcgcagcgttagaaattgcaattcgcaaacaaatagaactgggtcacacctacacaacacaaaatgagcttaaaccaaagttagccgctttattaaaaaaccaagagttatgtgccaaggcgtttaaagctggacatcataaggctcaatacgttcttaatcatcaattaggtacatatcatccaacagcacaattactgatggagaatgtcgttgcaaaacgactgaataagcttgctaggcaaaataatttatatgacgaaaatgcaaattctgcatattgctttgctgttgaacaattgccttatgagcttacccaaaaacaaaccgaagcagtaataacatgtttagataatgcagtaagctgtataaccggtggggctggaacgggaaagacaactgttctcagaacggcacttagagcatatcatcatctaggatatgaaattcacgcagttgcactcagtggcagagcggcaatgaggttgcatgaatcgataggttttattacttcaaccatcgccaagttacttcgtgatgcaccaattgaaccaagtaatgaacaaccaaagcacctattggttattgatgaagccagtatgattgatttgcccacaatgtatcgcttggtaaaccatcttcatccagaggtacgcattatattcacaggtgaccctgaccaactaccaccaatagggtgcggtaaggttcttgcagacatagttctatcaaataccattgcaaacactatgctggatatcgtaaaacgccaggaaggctcaactggtataccggaatattcaaagcaaataaaccaaggcttagtccctgaaaatttaagttctggggcggtatactttcatgaaactcctaagcaccgtattgcaaatgtatgttgcgagttatatgaagagtcgtcatacaatagccgtgttatggcaccgactaaaaaactggttcaagacattaataatcaaattcaggatgctgttaatgagcatggagagcaattaaagttcaatctccacggcgatgagtttcatgtaaaacttagaattaacgatcaaatattgttcactcagaacttatacgataaaggaatcaacaatggttcgcttggggaactcacttcggttacttcctccgaaggctcatttggtgaagtgacactagatactggtgacaaagttgaaatcactcagcaagtgcttgatggaatggagttaggatatgcaataacactacataaagcccaaggctcacaatttcctagagtaatcatagcgcttcaaaaaggtcgaattgttgacagagcttggctttacactgctataactcgggctgaaaaagaaatacatattgtcggttcatctgaagattttaaatcaatcactcagtcacctagtaactcaaacaagagaaatagcttcctttatgaaatgttccggatgtaagaaatagcatctaaattgaacaaatttagttgtagtaaatcatgctcaatcttacacattcactggttagtcaagattaaatcgtccagtcggacttctggtatcctaactcacaattggacaaaaacacgttagagtatttaatcaataacgcccacaataaggggctgattaatagtttgctaaaatgtgatgcggagaggaaccgagcaaacttttagcagtcccgctttatttgccttgttatgttgctattttaaaccgctcgtattttgtagcatgttcaggtcggttcattaagtttgcggcattaatcatatgctcccaaaacaaaacaccagggctgatgttgttttccattacaccatctaattcttccatagccaaacgaagctcgtttactgataagtaatgtaaaaaatcttctttactgtaaccaaaatcagactctttaatatctgagggcaaaagtttatacgcggctagtaactcttctgatattagcttccacttctcagtagtactcataactctcctagcaacataacgcccttgctaagtggctgacaacgcatagctactctacttgaacaaaccaccgtaaacactgtatcaaactagaatcaaaattgccgagcgttgacagtccatcttgagcagtttgttatgtttaaagccaaacaagcccactatatggtttcgttcttagagattctaacctgctttccagcgaacctgaatgtatctctagcttgtggccatcagggtctaaaatgtacagtgattgcccttcacttttgttctctttccaaacatctacccccaatgaaacgatgcgcttcgcaaaggcgtcaaattcttcagatgcaatatcaaaagcgacgtgggtatagtcggcttttaggcaaggttcatcgagtgaaagacaaaaccagagttcacctacagataagtaagctcccttgtcccatttagcatgagcagtgaaccccaaaatatctctataaaactcaagagaggattccaagtcactaactgcaatagtgatatgatttagtcctaaaatcaccgctttctccattaaacataacgcccgcataatgggcggataaagcttggctaaaatcgcgaagaatgagcgccagccaaactttagacgtccatttttaatgcgcttgttaggtgtacttacactcaaatgttttgtgtatatgcattaataccaattaattcggaaacaccattacccgattttaaagcgaaatttattgaagaaacaaacatatccaatgataaaacttcaaattgaaccgtaaattttgctgaattcgattcgccatctgaaactgaaataaatacagcagtatggccagcagaatcgatgcaataaaacttaagaaaacagtgtccataagatgagccgacttcacctacttcgaagattatttcatccgaattagacttgggaaaactagacaaattttctgcgagatcacgcagcgattgagcattaaaatactgctccgtttctcctgcgaatcgctcattgcatgccttaacccatattttggatggatcatcttgcaaaaactcgagctctaatctgggttgcatctatatgtacacctaacacccacataaggggcagtaatgcgtgggctataataggagcgaagcgacagagcccacgtgttactgtcccagcgagcctgcgagcggcttaatgtgcttgttagttgccggcatcactaaatttatcaagatagtcagaaattctgggcaatatgtctactcgtttaacaaccttatcccgtaagaagaacagcaactctttggaattatcaacataatcagtaaaacgcccatctttaacttctaattctaagtttggatagtgggttaacagttcttgttcggttaacccaattggaaaaaagccatctaaacttacatccggtgaatagataaaaattctttccaagataaaattaaaatcaggatcaaagtctaaccttaggccttgcgctttgtattcccaaacttcagcacgaataccgtctttaccaccttcattttcgacgatatcaggtttaccgaagagttctaaagcatcttctttggtagcaccgaattttaatacatccaacccttcaagtggctcaattttcataaggcaactaacatgtttatagcgagctaatcgcgcgtttttctaccacagcgtagctcgtttttcttattagattatttctaacaaacttgttaactaattaccagtgttattaaaatttaggagttctcgcttttacctcaggataaaaacgagcgattgggtcgtttttctgactatgcaagcaatatattttgacaaaatagaaaagcaattgcggacgttcgaagcccgcttttttgagaaattcgccaaacacgtcttggggcaaaggcgagtcagcaagtaactcgcctatggacataaacgcgttaaaatatttgaagagtcatgactaaattaaggcataaaagtatgccactacatggtagtatttagtaaggaatgctgtgaattcatttcagcacaatatgggcactaagcctaataacttgtggcgtttctttttaactgtgacaagatattatcattcaattttaaccaattagtttcgtattcccatgtctttttgaagtcgtcattgctccttgaactttcaagcatttctctaaaatcgaaaacacctagaaaattatcagccgtaacatcataccttccataacctcggttttcaggcacaatatattttaaaaaattagatttaaaatcagatatagtgcttactagttcctttgaatcatttagtttttcttctaagaattctttttcaaaacctgtaattgtgcctgtcgcttctaaagcaccagattggtttatagcgattccccaatttttataggccaatgaagggttctgccgatttatatctgaaagaagtgagtcatagggagacagcattttttctaccgccttaggcacactacctcccggcaaatataattcaccagtagcaacagctagctcatgcatatagtcatcaactgttttagttatgtctatctggctcgatgtcatcgtcagcggtttggtatacgtttggtttagctctggaggcgcgctttcatgatatacgtcatccgccaattttttaagctcagtttctaaaagagccttgccatttataggtgactctaaagtcacattttgaatattaagtggttgcggtaaacttccagaattaaccttcataatacgtccctgatttagtgatgtaattttatatcggcctattttgatgattctttatatttatcattttttaaaaaagggagccaagctaattgtattattattagggatggattattcttgaaaaacttaggggagtagtctcttgcattaagcaaggaaactgtcaacagtctccgggcaacatcgctcgtggcagtttcgaaccgtatcaggttttgacaagacttaaggcaatgagtcatttcgggcagagatggtttgttgtctttttagtctagtctgccctaagggtaaataatgaaactacatcgctgccaaagttcacttcattttgcaaatagaccagacaactctgccatacacccttcaggtattgatatcgcgggggctcagtcatggttttagctatagccgctattattgcagggtttgccttactcgtatggagtgcagaccgctttgttgaaggggcggcatctacagcaggccatgctggcttgccttcaattttaattggtatggtcattgttggttttgggacttcggctcctgaaatggtcgtatcagcaatggctgcaagtgatggaaaccctgatttggcgttaggtaatgcactcgggtccaatattgtaaatatcagcttaattcttggtgtaacagccatcattgcccctatcactgttcagtctaaaattgttaaaaacgagcttcccttattattagttgtcgtacttttttgtgggtacttgctgtatgacggcgctttatcagtgattgatgcaagtctgttgttgggcggattagtcttgttcttagcatggtcagtctattcaagtatgaaatcaccaagtgataccctcgaaacagaatttgatactgagcttaaaagtcacgccatgtctttagggaaagcaattttctggctcaccgtgggcttaacattactcattattagctctcgcatacttgtttggggagcggttgaaattgcaactgcgctcggtgtcagtgaccttattatcggcttaactatcgttgcattagggacatctttgccagagcttgcagcttctattattgccgctaaaaagggagagcatgacatcgccattggcaatgttgtggggtcgaatatgtttaacatcttagctgtaattggtatcgctggtattattgagcctatccctcacatttctacagacgtactttacagagattggagtgtgatgcttgtactttccgtcatgttattggttatggcttacggttttggccgacaaggcagaataaatagttgggaaggtagtatcttgcttgcttcctatattgcttacaatggctacttagttaccagtatcattaaataacatttattgctaaattgtttagagcaaagcgcatattttatttatattaaaagggaaatcaccgatggacaccatcataaactttttttctgagcatcaattgcaacttatagcaatagcaaagaatacgctgctgactattttcatttttattggggcaaatatttgttcaaaattactaaaacgtgccgtacataaaggtgtttacagactgagcaagcaagatgaaatcattacaaaactgcttaccacgctttcaggctatgtggtttatttaattgcaattgtgattattttagatttatttggagtcaatacggccagtcttgtcgcactcgtcggtgccgcaggcttagcgattggtctagccctaaaagatacgctcagtaatgtggctgcgggggtcatgctacttttcttaaagcctctaaaaaaggcagagtttgttgaagtgtcaagctatacagggagtgtaaaagatttaggtctatttaccactgtccttgaaaccgccgatggtgtttttgtatcaatcccaaatagcacggtttgggcaaatgcgataaaaaactttacgagaaacgaaaagcgtcgcatggatataactgtgggtatttcttatggtgattcaattgaagatggacttgcggcattaagggagcttgttagtgaagaatctcgaattttgattgagccagcccctcagtatttagtccacacattagcagatagctctgtgaacttgcagcttcgtgcttgggtcgctacaccacattactgggatatatattggcaaacacagcgtaaaattaaagataaagtggagagcaaagggattactattccgttccctcaacgtgatttgcacataataaacggcgataaaaaataatgaaaaacctcgctcagtcctagcacgtttttctatgatagagtgacaggactgggcctttgcttgagagcatagctcgcgtgtaataatttaaaaacagaatttactatgctcaaatattggtataaaaacattccagcacaccacaatagtcctgagctattttggcgaagccgtttgatcgcccattctttattgatatgtactgtgtacttctttgtactgactgttatcaatatctttaaattcaacagctatgaactcgctttgcttgatgcggttgggctaactttgtctattttactatatgtttggttcattaaaagctcaaaaattaaagcggtttcatgggctgtggtgttattgattaacagtttaatactgacatttattatctcaattaacggcgcggcctattcattattttgggcaacattaattcctccattttcattttatttagtaggtcgaaattggggaagtttacttagtgcgtttgcttttgcagtgtgtgcttttatagtttatgaacactcacagaatccggaacctcttaaaattggccttggctctgtttttaatattattgaagttgccattgctcacattgtcttatttcgtttctatgaaaaaactcgctgaaaccgataaactcactggattgtttaatcgagaaaaactagatagaacgctttcaagtttactaaaaagctcgaattttggtttcatactactagacattgattattttaaagaaataaacgatacctatggtcacttggaaggcgataaagcgcttgtcattgtttcaaataaattaaagtcagtatctccaagtaaagcgttatgtgctcgttggggtggcgaagagtttgtaatcatcattgaaggggcaaccttagatgaaacaaaagaggttgcaacgaccattattacagatataaatggtatttattttcacgaaaaaagattgtcagtcagctgtggagtgacgattaatcacagtgatgataatacgctaacagtaattgaacgtgctgatttagctctatatcgtgcaaagaaaaatggcagaaatcgagttgaatataatgaatgaaacttggattaattttgtggtcattacgttcattaatgaccacattttgaatgtttaaagttatcttgcagagtgcttcaatgacgacacaatgaattgacacttttcttgctcaatacttagagggtgattattcattaatttagaaatatcataagctaaaaggaaacttctaccaccatctttatctagctcaccataatcaatgtccgtttctttataaaagtccttgctatgtgccacttcatttcggagttttattaagttaatcaaagtctgataaattttactttcattgtctgtaatgagcttaccagatgataaaaggaaccctaatacatctaactttttacttaagttcattgaaagaaacgctgttgcatgtcttttgtgatcagctttagggaaatgacgaaaagcccatgagatgatgccttcattaagcaagctttccaatgaagcggcagcaactaagataaaggagtatttatttgaattgaagaatgcatcatcatcttcagtgtgtgccggtagatattctgctgattcaattagtcctctagaggaagtaaatacaaaatgcatttccaaaattctgatgcctcgttgctttatagcgccccgcactgcaatggcttgttatgtttcaactcgttgagttttgcttttggcaaattctaaggtctttattagtaacgtaaagcctgaggccattaataagccacctacaatgaaataaaataatacaggattttcattaagtttaacgctaaatccaaatgctgaaaattgcatttcgaaaatactgaacaggctataaataaaaactataacggataaaataaaaagtagtttatttccaaatctataactcataagtcaacttttccctttgaaacatgacatgtctatagcgagcgaatcgcgcgtttttctaacacagtgtcgctcgcttttctgaatgactcatttgtaacaaacttcttaactaattgccattaagactaaaatgcagtagttctagcttttgtctcaggacaaaaaagagcgattgggtcgctttcctgactatgcaagcaatatactttgacgaaatagaaaagcaattttgaatggccgaagttcgctcttttgagtaattcgcctaaacacgtcttggggcaaaggcagcttaaattgccgccttttcttaattaacaatctgtttctctggatatcttgatagcatcttcaatctcaattccgagatatctaattgtgttatagatttttgtgtgaccaagtagtaattgaacagcgcgaatatttttggttcgtgcgtaaaccaaagtcgctttggttctgcgcattgagtgagtaccatatagatcagaatcaagccctaactgctcagcccaactcctgattatagacctgtaatatgaatagcttattggttgattagtgcgacgtaaactcctaaacaaatattcactaggtttcaatttaccttcttgaacccaacggctaatactttgttgtgttctcggagttatctcaaattgaacttcgatccctgttttcttttgtgtccattgaaccctctcgaaaacttgatcttgggttgcgacatctctaacccttaaagacagtagatcacatgatcttagtttgctgtctatcgccaagttaagtaacgccagttgcatcaagttattttgaatttcaatgcgagtacgtatacgccaaatctcttcaagtttgaaaggacgtttcatcccagtagcattgtggtttagtttttgtttcatagtgacctcctaattaaaagtcactattgataatagatagattgccaatgactaaggtttggacaaaaccgagttacagcgcttgctaaattagcaagtaacggattacctaaggtatggcatccgctatggctctgaaattaccgttatactatgtgttcctcttgtcaaagcaacatagaactcttttgggctcattctcgtagggtacgtaacgatgcagtgattgtattccagccccttaaccagtaaagtcgtcccgatttggttatccatgcgtactgggcgtcccctgtgtcgaaagtcctgcctatattgctttattgcttcagccaaaggtaaagtgtgagcgtagcccaatactgatataaagcgagagaagagatctcttcgataaacttttgtttcggtacactcagaaagccctttaacaaaagccatcaacgtcgcaatattcccattagctaaaaactcgttcgcggaagcaactaaagatggatatctagttctggtagtaaccttagcagtttgcccttcgatagtttttttaggtaaaactcctccaacagatgtcatacatgactttgcgaggtcaacaacagcaaccagtttagcattattacttttagctttaattaccttatcaactgttctaataagagccttgccttcgacttcctcaatacttgtatacataccagataggcactttgataaagcatgagtcttacgtttatattcttctgaacccggataaacaacaatacactttcccgcctcttttgctttttccttgaacactgtaagcctgttaggagattgcatatcctccaagtcataatgaacatgatgaaaacaagctagttctttaggtgcttttggcatatcacctttagcgatttcttctcgaattttgtataaccattcacctaattgttctgtacctgcgagcttccatcgccatggagttttgagctctcccaacttatcaaacttaggtataatacaggtatcccaattgacaactttctgtccatcaaattcaaatattgcttgtaatgggtctccaatcatccttgttggtttaagcttgacaagcttaagaattaggttgtgctggatatctgaacaatcttggtattcgtcgacaaaaacaccagagtatgtactagcaaagacctgctctataaagttatatgaaaaaagcaaggtcgcactttcatacaaagtgctccagtgagcttttgtttcgggctcatcaaacacccaattagctattttcggataagccttaacccatttcaaagcaaaagaagcgattgtatctacatggtattggctagagggcacattttggttggtcaatttatttttaattgagtcaactccagcaaatgtatgcgtcagtattagctgctttcctgtacaagatttaacactttctgcaattaaaaaagttttaccaaaccccgctggagcaatgatataacccgatttaggagcttctgctaaagacttcgctaattggtctgtcatagtgctacaaaccctcttagctcttccatcttcttatgagtatctgttcccttcagatttccctcatgaaattgagccgttgtctttttacctagtatttcacctaaagtaatatttttgaaccaacttgacgacttagcagcatctccaaccgcctttctgtattcttccgtatcaatccattcttttatgttatctggggctcgaccacctagtttagattctacattggcacaaatgtttaaacctaagtcatctttagcaaaggaaagtaactcaattactgaattccacggaagatctaaaaacaaacgttgttccagagccattgccccgtcccacatgatcactgttatatctttttcttctaggacttttttatgtttatcaccaaattgtttaggatcatcagaatcaacgaaagctgctactttatagcccaatgagtgcattacttcagcttttggttttacttggctaccgctagctgcatcaagatacgaaacgccatgataactcagggactcattatttaaacttacatagaaatcatccattcctctgataaaaccgacctcagttgccccctcacatactatgaccttagggcataagaatgcctcagcatgagagcgtaacgttccttgaactttggagtcgacaggtgatttatctgccgtattcttaattgttactatacctgcctcattatgtacaatattgagctcttcaaagttgagttcacgtaaaacgattgggctatgcgtggtaaacagataggaaccttgatggtcttcttttaaatgcttcaataaccttgaaattcgatgtggctctaagccgttctctagttcatcgataagagttatgtgttggctctttagattctcagcctgaagaccgcaggttaacattcttctagagcctaatcccaactggcgtaagggaacatctccttcatgcagagaaattccgcctgcctttacatttatggcacctaaatcaagatgactgcgaaacaagtctgaagactgaacaccgagtttttttgatagctcataaactttggccgccgccttatctaaagcatcaagatcttcacgattagcatcaaaagcccctttagctgcccgtgccgccttggcaagatttgactggacacttgcctcctcagttagctttgatagtggactctgagcatcccacgttagcattctattactgtaggcaccgataaaggtcgcattcaggcgttttctatctgctaaaagaaatgaaataccatctgggtttctatcagtgactacacgccaattcggctctaagtctgattcaactttaagctgaactgttatcactggttcgtcatcaacaactaccaactctttttcgtactgttgaggctcatcattaatacgagactctattgggttccatcctctcaaatgaagcccaaacttacccatattaaggaactcttcaggaagatctccgagtgtcactttaatacttatcggatcatcaatattaaccttgaagaaatcgacatcactgagttgaagtacccaatgagggtaaaatgctaatctgattgcttctaagatagtcgtcttacacgaatcgcctttacctataagggtaattatttgattgtcgggtaagcaccactcaagtgacttgattcctctaaagtttctgatttccaaatgacgaatcttcattaccaatactcaataggttgaacataactcaatttaataacacaattcgtcctcaaagtcgttatctaagagcatggtcttatgagttttatttttaaaatcaaaatcttataaacacctttagctttcttagttatacttaactcttttcatatcaccctctgaaacataactcatttttcgatgagtgctttccaatcgataaaatcactcaaatttacaatttgactatcatcgacaaagcagcctttgaatggagaatcttgcacaatctctgaaaagatacgcttaaattgacctagtacttctgctgtatttgtacagctttcaaatgaaattacgtggtatgcgccataacacttatctggtggtatcagatcaaaatagcgtttagggccgcgtggtctttcggggtttgatttagagataataaaggtaaaaccacctttccctttaccgactctaatccagccaacagcatgattctctcgccagcttctccccatatctttagccaactgatctttcattctgattcgcatattttgactaatcacaccatcagtttgagcttctaactcagaaatcctcttagcaaaggcattttcatatctttcttcaaactgttcctttgtttctttataaattggcaagtaaaagtacattcttcccccacgagttataacgctatttaggcagaatctttccgcgtttgctttcggtctatcttgctaccatcacttatgcaactcaagcaatataagcacgttatgtgattattggcctttcatgacaaaaatccgcccgaaacatcttacgatgtgacattaggtttagtaaggccaaaagaggtgaacaacatgtgaatgagtttttaatctaagtagaaaaggggcagaagcaatgtgcaagttttgcaccttactcactcgttaatggacaaaaacacgttagagtatttaatcagtaacgcccgcttaacaggcgtaaaattcttggctaaaattagcgacgaaggagcgcaagccaagcttttttacgtcctttcttgaagcgtttgttatgtaacgtctacaccagaatgtaattcacaaatagcgtcaacgataggttgaacctcaaatttttccccaagcacttcaaatattgctgtatccatataaaaagctctaaacaaatgggtggggacaccatcgctttcaattgtagcacctacatacgaaggcaaaacatagccaacaatcggcttatcattaaggtaaaagtccaagttttcatcaaagtgttcaaggcagtttctaagtttcctgctcttcaatggactatttccatcaattttaaagatactttttaattgggaagctcgtttatgatgaagcttatcttcgcctttttgggcaggccaaaagtatcttgaaatagaagcggcatggaggaaaatattatgtaagtgatttaggatttgatcagtcaattcacctgtaagttcatattcaccttttttctcatttgtcatgttggcgaaggagtgaagaaagtctattgataacattgctgcttcgcaatgaaatcttatcgcttgaccataaaatgcaacatatggtggttgaattccttcaaagttcatacagactatccttagttacataacatgtttatagcgagctaatcgcgcgtttttctaccacagcgtagctcgtttttcttattagattatttctaacaaacttgttaactaattaccagtgttattaaaatttaggagttctcgcttttacctcaggataaaaacgagcgattgggtcgtttttctgactatgcaagcaatatattttgacaaaatagaaaagcaattgcggacgttcgaagcccgcttttttgagaaattcgccaaacacgtcttggggcagaaccaatttaggtagtctgtcaggtataatcacatcaagaaaacgaaactgacagattacattcagactaattcaatttagattgttacaactaaattttactagcatcaaggcttcattctgatcgccgatattagaattaagccttctttatgatacaagaagacttgctttcagcaatcatagagtaagttaacgaagaaatcatttcagtcaaatagcttagttgtagtcatcagggtttagtggctccacgcgagctaaatagccgtgtacttttatttgttcatcagttaaagattgatctgaaaatttttcaagttcaattgagcgcttatcttcagtaagcttacataatagaatatcaccgatatttaaattacattccttattgtcaggtagtggaatagccccatttttacctactttcacaatcatatatcaacctgcgtatggtatttaaatagtcttgactctgtttaaggatattagaaaaaggcttcattctgatctcaatacttaaataaagtcttgatgataaactcgaatattgaaataagccttcattctgatctcaatactaaaatgaaaccttgctgataaactcgaatattgaaataagccttcattctgatctcaatactaaaatgaagccttgatgataaactcgaatattgaaataagccttcattctgatctcaatactaaaatgaagtcttgatgataaactcgaatattgaaataagccttcattctgatctcaatactaaaatgaagccttgatgataaactctaatattgaaataagccttgattctgatcctggtattaagatgaaggcttcattctgatcgtggatatttaaatcaagccttgatactgatctccagcaatcttatttacgtgaattatcaaatttgctctgagtgcgtaaccagaactcactaggcattccagtgacctcctcaagtcgtttagcgaacgtaatagttaccccctcattccctttaagaaaatcactgaattgctcgacagacaggcctaacactttgcagaggtcactattgctcagtccttgggctcggaatttatgtaagtacagagcctcgaaatatcgagcaggatgcagtagctctttgtcatctggaatatcgacaatatcaccgtcctcaatttcagcaatgcttctaagcttttgttggcttcgaattctagaaatcgaaacatcgactccggggttagctaggtctttgttcttgatagggtttataagttgcttttggcttgtttgccaactgtcactcgaagcatggattacttttgcactcgggataacgctcatgaccgtggcaacaactgattcgaccaacttagcatggctaatcgcatctctagttaattcgattgcaattgttccacctcctgagtggcttataattgcatcatcaaaccccgcctcgaagagacaattgtcaatgtcatctaacgttagagagtcattattaatttcaaaccttatgacagcttcaaccataacgggtatgcctttttctggtcaacagtcacttaagcctacaccaacaaccccaaaacaatcaaaatgattacatcaatttgattgctcctttttgccgtttaagctaatgtactttgattaaaacttggttttattaaagtatgcagctcgaaaatcttaatcatgcacagcgcgaacgccttgcttttattgactttagccttgaattttttgggcaaatagcaagggctgacttgatacaaaaatttggaactggtttggcatcatgtacacgtgatctttctctgtatagagaattagcaccagacaatgctgtgcttatgcatgagaataagcgttatgtgcgctcagacgcattcagagccattttcgagcatgatcctgaggaagccctaagaacattagcaaaaggctttggagatggtttctcgttgccacaagagaagtcatcggcatgctttgattcgattcggttgcttcacccaaacgttgaaatcatttcagccatcatgcgagcgatttactcaaattcagcgattaaatgtgaatatgagtctcttagcagcggagcaaccaaacgggagttaataccacatgccattgttaataacggtcatcgttggcatgtgcgagcatatgaccgcaagagcaacgagtttcgggattttgtttgcacacggttcaagcgtatcgaactacaagaaactgagcctaaaagtaatgaattagccgacatggatagcgcttggaatacgctgtgtgaattgcagctagtaccacatccaagccttagccatagcaaggcgattgaaatggattacggcatgacaaagggcatacttgaacttgaggttcgagctgctttagcaaattacttacttcgtcagtggaatgttgattgtacagacaatgcaacgttaactggcgacgagtaccaattgtatttgaagaataaaaatggcctggtcgatttaatcgacttctcaataacaccaggccaacaacttaattaggaacagtaaccaagatggttgaacaacacaaaaaagcactcgaaaaacagttatggaatattgccaacgccttacgtggcaacatgagtgctgatgaatttcgtgattatattttagggtttatcttctacaagtatttgtctgagcgtatggatatatatgcagacgagctattaaaagaggatggtattaagtttgatgccattgacgaaaacaccgatgaaggcaaagaatatctagaggctattcaagaagaagccattgatctcttaggttactttttaaagccaagcgagctattccatgtgcttgctcaaaaaggtgaaaacggtgagtttatcctagaagcattatctgaagtgcttaaccatattgaacaaagcaccatgggtaccgcatcagaagatgacttcaatggtctgttcgatgatttagatttaacgtcaaacaagctgggaaaaactgaaaaagccaagaacgagctgatttcaaaaatccttgttcatcttgatgatatcgacttcctacaccacgaaacagaaatcgatgtattaggtgatgcttacgaatatctaataggtcagtttgcttctggtgccggtaaaaaagccggtgaattctatacccctccaatggtttcaaaattgctagcaaagctcgtaactatgggcaaagacaaattgcgaagcgtttacgacccaacctgtggttcagggtcattgttgttacgtgtagctaaagaagtcaaagaagtgggcaactattacggccaagaatctaaccctagtacgtacaaccttgctcgcatgaatatgatcttgcacggggtacattatcgccagtttgatattcaacaagacgatacgttagaacagccacaccatattgaaaagcgctttgaagcggtggtagcaaaccctccgttttcagccagttggagtgctgccactggcttcttaactgacgaacgttttcaagattatggcaagttagcaccttcctcaaaggccgactttgcattcgtacaacatatggttcatcaactagatgacgacggcactatggctgttgttttaccgcatggcgtgttattccgtggagctgctgaaggtcatattcgtaagcatttgattaaagataagaactacctagatgctgttatcggtttacccgccaacatattctacggtacatctattccaacttgtattctggtgcttaaaaagaatcgacaacatagcgataatgttttgtttattgatgctagtaaatattatggcaaagcagccaatcagaattatcttcgagaagaagacctagaaagaattctagaatctgttgcacatagagagaacatcgagaaattttcctatgttgctcccattctgccggttatgaatcgagaatctatacaggaacatgactttaatttaaatattcctagatatgtagatacctttgaagaagaagaggctgttgatatagaaaatgtggcttcagaactttcacagtttgataataagttacaggatattaataaagctattcatcagttttgttctgagcttaatatcaaagcgccattttaaagagggaaattatggaaaatcgaactcttcctatgattagatttactggttttagcaacgagaaaggctatccaagacataaatttgaagacatttttactttttcatctggcaagaatatcaaacaaaatgaagcttctcccgaatatgaagttccctgtgttagatatggtgagctataccacatgtatggagaagttatttcgaaaaccattaattgcacgaatttaccgcgctctgaactgacttttagctttggaaatgagattctattgccatcggcaggagaagacccattagacattggttctgcctcagctttgatgcttaaagatgttgctatcggcagaactattaatgtgttaagaccaaatggcactattgattactcgccaatttatgtctcttattacataaatgaaaagctgagaaaaaaaatttcaacactcgccagaggtgcaagtatcagcaacgtttataactcagatttgaaaggcttaaaaatcaaccttccatctattgatgaacaaaaaaaagtagctgaatttctttcttcggtggatgaaaaaatcagcctaattaaagaaaaacatgccttactgactcaatacaaaaaaggcgtgatgcaaaagctattcaagcaagaaatccgctttaaagatgacaatggcaatgcctttcctgattggcaagagcagaagtttgagcaagtttttgagcgggtaacacgcaagaataaagaagataaccaaaatgttttaacaatttcagctcaacaaggactgattaaccaagaaaagtattttaataagtctgtatctgctaaggatgttactggttactacttgttagaaaaaggtgattttgcttacaacaaaagctattcaaaaggctatccaatgggcgcaattaaacgcctaaataattatgataaaggtgtcgtctcgacactttacatctgctttaagtctcatggtgaacagcacgatgagttctgggagcaatattttgaagctggtaacttaaatagggaaataaacaaaattgctcaagaaggtgctcgaaaccacggtttgttgaacgtcagtgttagtgagttttttcatgatgtaaaaattttagctccatgctatgaagaacagcaaaaaatagcggcttttctgcgagttcttgataaaaagctcgatgcagtaaatcagcaaattgaactgactcaaacgtttaaaaaaggcttgttgcagcagatgtttgtttaaggattagaagtacaaggagttattgtggcctatcagtcagaacaagaattagaaaataacttagtagcacagctcgttaaaggtggctttgaaaaagccgtcattaatgatgttaagtcccttagagctaaccttaaaaagcagctttcaaagctgaatggctttgatattagtgataatgagcttaagcaaattcgtaatgctttatcaaaaggcaacgtgtttgataaagcgaaaacgctacgtgataggctacaaatcaacaaggacgatggcaccgttggttatcttcgatttcttgatgatgactttagtaagaatcacttccaagtaactcagcaagtaacgctagaaggccattataaaaaccgttatgacgttaccatactggttaatggcttgccgctggttcaaattgaacttaagcgcagaggactagagcttaaagaggcgtttaaccaaattaaccgttaccagcgccactcttattgggcggaagatggcttatttcagtatgttcaggtatttgttatttcaaatggagtcaatactaagtattacgccaataatcgcaaacaaagctttaaacaaaccttctattgggccgatgttaaaaatgagcgttttacagaattaactaagtttgccgacgagtttttaacgcctcaacacctgacagatatgatcactaaatatgtggtattgaacgaaactgaccgcattcttatggtcatgcgtccgtatcaaatctatgccacagaagccattattgaacgagttgcagaacgtgaacagttaaaagctcagaatcaaccaactgatgagctcaacggttatatctggcataccacaggctctggtaagacactaacctcgtttaaaacagcacaacttcttaccggcgatagcaacatccataaagtggtatttgtggttgatcgtaaagacctcgactaccaaaccagtaaagaatttaatggctttgccaaaggttgtgtagatagcactgataacactaagttgttagtggatcagtttactgacgcgccaattcctgaggataaagttaacgagaaacgaaataccaaactgattgttactaccatacaaaagctcaataacgccattagccataaacgctactctaaacgaatggaaccggtgcaagataaaaatatggtgtttatatttgatgaatgccatcgcagtcaatttggcgatacccacaagaaaatcactcagttcttctctaatcatcaaatgtttggttttaccggtacacctattcttgaaaagaatgcggtatcaaaatcatctcgtaaatacactacgacagacttattccacaagccacttcataaatacaccattgttgatgcgattaaggacgagaacgtgctcaaattcaatattgagtacgttggccgctataagaagaaagacagcgctaatgaggtggatattgaggttgaaggcattgataccaaagagctgatggaatctgatgttaggttagaaaagatcgttgattacattatcgctcagcataaacgcaaaacgcacagtaaagaatttaccggcatgttctgtgtgtcgagcgtacctgccttaattaagtattatgagctgtttgctaagaaaaaggctgaaggtaaacacaacctcagaattgcgacgatattctcatatgctgccaatgaagaagacccagacgctgatggcttagatgaggccgtgttggataaagttgccgaacctcaagccgcatatagccatagccgagataagctagaacagttcattggcgattacaacgagatgttcagttgtagctataccacgaaagacagtgaatcgttttataactactacaacgatatctcaaagaaggttcgggagcgcaaaatcgacattttgttggttgtgaatatgttccttaccggctttgatagcaaaacacttaatactttgtacgttgataaaaaccttaaataccatggattaattcaggcgtattcacgcactaaccgtattctgaatgagcaaaaatcacagggcaatattgtttgtttccgtaatcttaaaaagcgcacagatgaagccttagcactgttctcaaacaaagacgccagagacacggtgataatgccgtcgtatgaagaattccttaagctgtttaaccgggctttagagcagcttaaaaaaattgcgccagaggtagatagtgttgattcattgcaagatgaacatatggagctggaatacgttaaagcctttagggaattaatgcgcttgcgtaacgtgctttcaacctttgccgactttgagtttgatgacgtagacatcagtgaacaagagttcgaagactataagagcaagtaccttgatctttatgacaaagttaagacaaacacagtacctgaaaaagaatctattctcgaagaagtcgactttgaactagagctactggcaatggatgaagtaaatgttgcctacatcttaaagctgcttagcaagctcaaagagacagatactgaagaagaatatcagtatcaatataaagcacttatgcaggttattggtggtgatcctaaccttcgcagcaaacaagaattaattgataaattcatccaagaaaacttaccagaagtgaagtcagcggaagaagtggatgacgcgtttgcagtttactgggaagtagaaaaagaaaaagccacccaacaaatggctgaggaagaaaatcttattccagaaaacgtaaaagagctggtcgaacgcatgatcttcaacaaccaagaaccactgcgtgaagacatcgtagcaacgatggaaaagcccccaagtgtattacaacgcaagaaggtaataccaaggctggctgagaagtttaagggctttgtgaatacgttttatggtgggatgtagcacttcactaaagccaagaggctttgacaaaattataagaatgtaggatagataaaatggaacctgtctcaatggctgttggcggagtagcttattacgttgctacaaaattcgtagaccaatttataacacaagagggatatggctatattcgcaacctgctttttccaaagcaaaagtatgtagacaggctctatcagcttattgaggaaacaacttcagagtttgaaactgaatacccaaaagattcagacaaggttccgttctatcaatctcagccgttatttgatgtcctgaatgaatatgtattgtttagcgagttacctgacaaatcggaattggttaataagtttaatgaaaatccaaatgtattacccccaacgcagcagcaacttgaacgtttttatgcgattttaacgattaagataaacaactgtgaaaagttgaaaaaactccattttgaagaaacttataaagaaaaaatattcgatatcagtaatgaaatattacagataaagctcatactgcaatcattagatgagaagttaacatttcacctgagcaatgattggttaaatgaaaaaaacgcactggcaattgcggatttaggtggacgatatacacctgagttaaatttaaaacttgatattgccaaggtatttgagggccttggaaggactcaagcattttctgatatgttttattcacatatcgatagttttcttatcaaaggaaataaacttcaccaatgtgatgaaattgctacaccattatccgtaatagctgagtcgctaaacaacatttttaacctctatcaagaacctgacatttctaaattaagtgaagttccaacgaataagtttattgataatgtttccagatgtcaggaagccattaatgagtcggaatcagtattgtgggagttacgggaagaggccaaaaaagaaggtgaagctaatcacttcagcgataagtattcatctactttgagagagctgcgggagtttgattatgcgtgcaataatttacttacgtttattacctcaataacagtcaaattagctaacaaccccttcttacttctcgaaggaaaagccggaataggtaaatctcatttacttgctgacgttattaaaactcgaattgcctcggggcatccctctctatttattctaggtcaacagcttactttagatgaatcgccctggtcacaaatctttaagaggttacagattaaagttacttctcgtgagttcctagaaaaactgaacttattgggtcaaaaagcagggactagagtcttaatctttattgatgctatcaatgaagggaatggcaacaaattctggaatgataacatcaacagttttgtggatgaaatcaaggagtttgaatggctaggtctagtcctatcactcagaacaacatataaaagtgtcacaatttcagatgagaacttggaacgcaataattttgaagtgcatgagcatattggatttcaaaatgtcgagttggaagcagttaatttattttatgactattacaatatagagaggccttcgtcaccaaatcttaacccagagtttaaaaatcctctatttcttaaattgttgtgtgagggagttaagaaaaatgacttaactagagtgcctgttggatttaatggtatttcaaatattctgaattttttagtggaaggagtaaataagtcattagcatcacccaaaaaatacgcgttcgaccccagcttcccccttgtaagagacgccctcaacgaaatagtaaaagttaaattgagtattggtagtagtaatatttcacttaaagatgctcatacggcggttcaatctgttgttaatgattatgttactgataaaacttttcttagcgccttaattgatgaaggattactgactaaaggcatagttagacatgatgataactctaccgaggaagtggtgtatgtggcttttgaaaggtttgatgaccatttaacagtcaagttcttattagacgatgttgaaaatatcgaaaatgaatttaaaactgatggtcgcctgaaaagttattttaaagatgaatatgacttttacagacactcgggcatagtagaggcactatccattcaactaccagaaagatttgggaaagagctttatgaattattacctgagtttagtgagaatcataacttactagaagcatttattgaaagtttggtttggcgagacatcaatgccattgatttcgaaaaaataaaaccttttatcaatgagcaagtatttaggtttaacaatagctttgatcattttctagaagcaattatctcaatctcagggttagttgatcaccccttcaatgctaatttcttgcatagttggttaatgcagtactctttagccgatcgagatgtattttggactacacaactcaaatataaatatagtgaagactctgcatttaggcatctaatagattgggcgtgggctaggacagataaaagctacatttcagacgagtcaatagagttggtggccactagtttatgttggtatttaacgtcgagtaatagagagcttcgcgattgttctactaaggctttagtgagtttactagaaaatagaatctctgttttgacaaaactaatcgataagtttgatggggtgaatgacccttatgtttgggaaagaatatttgcagttgcattaggctgtacattacgaactgataatgttcaggaattaaaatgtttagccgaaactgtttatcacaaagtattttgtactgaatatgtgtatccaaatatattactcagagattatgcgagagaaatcattgaatttgctattcactccgggctggtgcttgacgatgttgaactggctaagactaaacctccatataatagtagttggcctgatgaaattccttcaaaagaagaattagaatccctttatgatagagacccctattggacactttggggctcgattatgggaggcggtgacttctctcgatatacgattggaacaaatcacaatcattcagattggtcaggttgcaagtttggtgaaatccctgtcgaccgtaagcaaatatttaaaatattccaaagtaaattatctgatacccagaaagagctttatgcagccactgacccaatcatttatgatgacaaggccgaagaaattacatttggtgacactacaattaggcttaatagcgcaataggcagaaaagaccaggatgaaataaacgcgaacaagcaattgtttaaggagtctttggcagacgacttattaattgactttgaaaaagatatagagccgtaccttgatcacaataataacttactggaaacggataaacactttgatcttagaatagcagagcgttttatatttaatcgtgttatagagctaggctgggatcctgacaaacatggtgattttgatcgacaagtaggaactggccgtggtcgtcgagaatcatttcaagagcgaattggtaagaagtatcaatggattgcttattatgaatatatggcaaagctggctgataatttcattcgatttgagggttatggtgatgaaagaaaggaaagcccatatcaaggtccatgggagccttaccttagagatatagatcctacgatcttactcaaagaaacaggagccaaggtggtaagcaatcaagacatgtggtggcttaatgatgaagtatttgattgggattgttcttatgaagaatgggttaaaagcccgaatacaatagctaatccatatggtttgattgaagttaaagataacaccggtgatgaatggttaatattagaaagttatccatcttggaaagaacccaaaattataggcaatgaagattgggggcacccaagaaaagaggtttggagtcatatcagaagctacattgttaaagtagaagaatttgaaaattttaaggactgggcctcaaatcaacatttcatgggcagatggatgcctgaaggcagtgacagataccaattatttaatagagagttctattggtccgaagcatttcaatttttcaaatcagactattacggtggcgccgattggacctctgtatgggatcaagattccagagcaaagatagctgaagttagtattacttctgttaattatttgtgggaagaagagttcgataaatcaaaaatagaaactttgagttttctgaaacctagcaatttaatcttcgaaaagatgggcttaacaaatggagaaatggaaggtagtttcaaggataaaaacggaactatagtttgttttgcagccgaagctttacacgcgtcaaagcctcatttacttgtaaaaaaagaaccatttttaacaatgttaaaggaaaacagcctcgaaatagtttggacattattgggtgagaaaggagttataggtggctccctcacttccagtcatcattatggtcgacaggagtttagtggagcgtattgttttgacaacaatcaactaataggtagtcttaacacttataccatgagataagaataagtaaattaactagtatttttaaatggtactttgtgagttatatgaattataacttaaaccacttaacaacttagaaataaaggactttactcactcacccacccgtaagtggtatcttttagggggttatacaagagattaaagacattgtgccacctaattctgtaatggaagccatggaagcacaaatgaaagctgagcgtgtgaaacgtgcacaaattttagagtctgaaggcgaccgtcagtctgctatcaacgtggcagaaggtaagaagcaagcgcaagttcttgcagcagaagctgaaaaagcagagcaaatcttacgcgctgaaggtgaagctaaagcgattatcgccgttgctgaagcgcaggcagatgcacttcgtaaagtcggtgaagccgctgacactgaacaaggccaaaaagcaattcaactagacctagccactaaagccattgccgctaaagaagcgattgctcgtgaatcatctgtggtattacttcctgagagcggtaccgatgcaagctcactggttgctcaaggtatgtctattattaattctttaaataagaaacaacaaaattaggtgaagcgatggcgtttttagatacccatttagccgaagcattaatgattttaggtgttatcgcgctaatcgttgaggttgccgtactggggatgagcacctacgtattattgtttttaggcttatctttatttgccagtggcttacttatgaatatagagctacttgcaagtacttacaccacggcactttggagtaatattgtgtttactcttggttttgcggtcgtgctgtggcgtcccctaaaacgcatgcaagataaaacagagactcagcctgttcacagtgactttgctgaacttacctttgttgtaaatgcagatgttgatgaccaaggtttaaccacacaccaatattcgggcattcagtggcaactaaaaagccactcccccattgcggctgggagcactgtaaaagtcaccgacaaacaagtcggtgtactttgggttgaagctatttaactcgcttagagtcaaaactctatttaattttgtaaccgtgtttgttatggttagtagcaatcacggttataagcaaggtagcagtaatggataataacaaggcactcgttgtagaaggcggcgctatgcgcggtattttcgccacaggtgtgcttgatacgtttattaaagaaagctaccaacctttcaagcaatgctatggtgtttcagcaggagccaccaacatcgcagcttatttatgtgctcaatataaacgtaaccatgcggtgatcacagattactcgtgtcgacctgagttcattaattatgttcgctttttaaaaggcggtcacctgtttgatttagactggctatggcaagaaaccattcgagatattcgccttgatttagacaccttcgaaaaacaagcgagtgagttttatatcgttgcaaccaatattaaaacaggtaatgctgagtatttaaaagcaactgctgaacttatagaagagcaattgaaagcctcatgtgcactaccaattgcataccgccaatacccacagatcaacagtatgcaattaacagatggtggtgtagccgattctattcctattcgtaaagcttacgaaatgggtaataaggaaattacagttattttgtctcagccgattggctatcgaaaaaaaccatcgaaagcaccttggctagttaaacgactttacaaagaaacacccgcgcttgctaaggcatccatcttacgagcagaaaactataatcaaagcattgactttgttatgaatccaccgagtgactgtaaagttaacatcatcgctcctcctcctgattttgctgtaggtcgaacaacaaagtcttacgctaagttatcagcaggatatgaaatgggtattgcggcaggaaaacagtttttaagcaatttagcttaatagctagtcgcgtatagaaacgaatttttgcaatacacaccccaaattattgcaaaaacttgcttaaataatattctctattagttttaatactaagtccttacaaacattctaatgctcatgttaaacaactataccgttcgtacgcgattagccattttggctttgttaccggtctgcgtttttgtgattacgtcaatatttacgatgtccattatgtcgagcatggtaaaaggcatcgacagtctttacgacgatagagtcatcccgcttgagcaaataaaaacagtatcggacaattatgccgttagcattgtcgatttatttcataaataccgtgctgagcaaatttcaaaaaatgattttcttgctgcggttgaaaacgcaaagggtgttgccgacaacaaatggaaaagctatttaggcaccaagctcaccaatgaagagcaacgcttagtaaatatcgtcgaaaagaatctcactgtggtagaaagcgaactcagcaaacttttaaatcaagttaaaaacaatgaattaaaagcaattcctaatgaggtgtttgtaaaaagcctttacgatgtgtttgacccactcagcgaaagctatcaagggttgataaaccttcaaatcaatgaagctaataagtttaaacttgcatctgaaaaagattttaaacaagtcactatagccatgagcgcatccatcagtattttgataatcatcttattatttattgcatttgtcatttaccgctctattcataaccctctgttatcattaagtaaaactattggttctatctctaaaagtgctgacctacggctcagagcagaaacttatggcaacgatgaaatagctcaagcagccactcatttcaacgcgatgatgaagcgaatacacgacctagtaaatgatgtaactaatgcaacattaaccttatcttcagcagcagagcaaatgaactcaattagtgatcaagtagcaagcactgccactgagcaagaacatcaatcagcaatgattgccaccgcaattacgcaaatgagtagcgcgattgagcaagtggccgcaaatgcgctttcaacctcagaaaaagccacccacacagataaaacagctaaacttggccagcaatcagtacaagaaaacattgatgcaataaaccgcttatcgcaaatagttaatgcaaatacacaacttatcaatgagttaaatacacaaacaactgatataaaccaagtcgtgatgatgatccaaggagtcgctgaacaaactaatttattagctcttaacgcggcgattgaagcagctcgtgcgggagaatcaggtcgtggttttgcagttgtggctgatgaagtcagacagcttgcacataacacccaaaaagcgaccgctaatatcaatgaaatgattactaaactacaagcaatggcacagcaagcagtcaccgccatgggtaatgcagatgacagtgccaaacaaagtgttgagtacgctgagcgctcttcacaattactcactgaaatcactcaagaaatggcacttattgccgatatgaacaaccaagtatccaccgcaacagatgagcaaacgactgttgcaaacgagctaagttgtaatattaatgaatttagtagcagtatttcactggttagcgaaagttcacaacaaaatgcacaagccagccaagaattggcttctttggcttcgcgtttacaacagcaggtgcatgttttcaaagtataaatgcagagactcaaataaatgaatagaacaatatttattttattgatggtattcgcgctattcattaaacagagctttggtcaagagcaaattgttattcaacttgcaaaaccgagctataccgacgcggtaaaaaatcaatacatccacgatattctcattaaaagcttcgccgcaatgggcgtagacgctgtattaatgtacaacgccaagccaatgaatgataaacgtattattgaacaacttagtcataataaaacaattaccttagcttggctgtctttcccttataagcaacccacttcattagttaacaccacaattcctttatacaagggtttgcacggtaagcgtttgcttattattcgtggtgatgaccaagcaaagttcagtgcaataaaaagccttgatcaattaaaaccattaattgcattacagcagcaaagttggtctgattatacggtgctaagagacaatgacttaactgttaatggcgagcttgattatcctggcatgatcaaagctctagagacaggttttgccgattactttccacgctcagtactggctattggcactgaactcaatagactcaaacagttcaattttatcattgcaccagacattatgctgcaatatcccagcgactattacttttacttaagcaaagagaatcaacacattagggatttgctagaacaaggtatgcaaaagctaaagcaatcaggtgaacttgagcggctctatttgcaatattttggtgatgttgaaaaacaatactctttaaatcaacgccacaccataacgctaaagaacaaggagtaagcatgctaaaagcagtgctaattatcatcatggcattggctatttttgccatgggttttatggcaggggtttacagtttgcctattttaacggagcaaccagcgcccgatgttgctattttgaagcagcatcaagatagagctcagtttagtgccgcgtttaagccagaccttaaaggctcagatcgccttcattatggtgatgggatggtctatctaacaaatgatgctatttctatgcaaggtactttatcacctggacctgactatcaactttacttatcgcgcaattttgttgataacgaagctgattttttagcacaaaaaggaaccatgcaacgtgttgcaggagtacgttcattcaatggctttaaattagttgtgccacaaggtattgatgtcagcgattacaatacagtggttatttggtgtgaaagttttgaggaatttattactgcagcacagtatcaatagctggattaataaaaacaaagccgcctttggagagggcggctttaaagcggcagctatgggtgtgagctgcctaatcaagagtcgctaattaagctgcatcttcagtgctttgtacctcttcgctgtggcgaattaagtaatcaaatgcgcctaaactggccgttgcaccactgcccattgcaataatgatttgcttgaacggtgttgttgttgcatcacctgccgcgtaaacacccggtaatgatgttgcacctttgctatcaatttcgatttcaccaaagcgagttagtgataacccagaatcttttaaccattcagtgtttggcaccaagccgatttgcacaaagatacctgcaagctcaagtgatttttcatcgccagagatacgatcaatatagtttaagcctgttactcgtttaccatcaccaacaacttctgtcgtttgcgcgtttttgataatcgtaatgttgtttaagctatttgctttacgaataaggacttcatcagcgcgtaaggtatcagcaaactcaagcacggtaacatgctcaacaatgttagcaaggtcgattgcagcttcaatacctgaattaccaccaccgataaccgctaccgctttgcctttaaataacggaccatcacagtgaggacagtaagcaacgccatgaccgcgatactctttctcacccggtacgttcatttcgcgccagcgggcaccggttgctaataccactgacttagcatttaaaatcgcaccattttctagcgtgatttgataattaccttgcttagtaagtgatgccgcacgttggttttgcataacatcaacgtcgtattcttttacgtgctcttctagttgagcaactaatttaggaccttcggtcgctttaactgatataaagttttcaattgctaacgtgtctgaaacctgaccaccaaaacgctctgcaaccacgcctgtatttaagcctttacgtgctgaataaattgccgcagaagcccctgccggaccaccaccaacaacaagtacgtcaaataactctttgtcgtttagtgcttcggcttggcgtgcagccgctttggtatctactttatttaagatatcagtcagattaactgcaccttgactaaacagctcgccatttaaatacaccgctggcaccgctaggatattgcgctcattcacttcgtcttggaacaaagcaccatcaatcatagtggccgtaatgttttcgttgtgtgctgccattaagttgagtgcttgcactacttgcggacaggtttgacaacttaatgaaatatacacttcaaagttaagtggcccaggtaatgatttaatttgttcaatttcactctgtgatgccttacttggatgaccacctgtgtgaagaagtgcaaggatcaagctggtgaattcgtggcccataggcacacccgcaaatgtaatttgcgtgttgttaataggtgaagataccaccatagacggacgtcgtacgtcttggttagggttatctcgcaccgagaatttgtcgcttaacgatgctaaatcgtttgctaagtttttaagttctgttgatttattgctgtcatccaaggcgataagcagctcaacagggctggtaatagaagcaaagtggcttgttaattggtttttgatattcgtatctaacatggcttagcccttgagttcagaataaataatctagaaaaattttgggtataactgcccaccacccgctaatgtgcttaatgtgagttgtgatgggcaattaaggttgcattgggacagcaaagcaaagctttgctatcatttaatgccgtggcaaattagattttgccaactaggtctaatgaaggagcaagtgtctcttcacctggctgccatgatgcaggacatacttcaccgtcgtggttagcaatgtactgtgcagcttgtactttacgaactaactctttcgcgctacggccgatacctaggtcgtgagtttcgattactttgatttcgccttcagggttcattacgaatgtaccgcgaagtgcaagaccttcatcttcaatcatcacaccgaagttacgtgtaatacgacctgttgggtcaccaatcattgggaatttgattttaccaattgtctcagacgtatcgtgccatgctttgtgagtgaagtgcgtgtcggttgatactgagtaaacttcaacacccatttcttgtagttgctcgtagtagtctgcaacatcaccaagctctgtcggacatacaaaagtaaaatctgctgggtagaagaagaagattgaccacttacctagcacgtctttttctgttagttctacaaagtcaccattgtggtaagctgttgcattgaatggttgtagttttgtgttaattaatgaagtgctcatagtattcctcattgatgtatttaaaaaagtttaattaacgcagccttgcgtctgcttgattaatacaatagaggtgtgagcgattaaaataaaattgattgtttagattaaattgatttgttttttagattgaactacaaataacccgtaataaatataaagccctcaatagcttactgcaattaagggctttgcttcagggaataaaattatttactaaagccgtataagctcttaggtttaatgtagttaggctcaattccttgctcttttgcagctgctaacatcacttgctcaatccaacctgcatccataatgttcatatagttgccatcagggtcaaagttgatgttagaacccataaccaccataaaggtatctgtcacttcagtgttgtcttcaggtacttgaaattgatgaatcgaaccgcctggctcaaataaatagctgcccgccacttgtaaatcatctggatattcagtgtagtgccaacttcccgctaacgtatataagtgcacaacaccagtatgaaaatgttttggtaaaaccgtacctggttcaaataaaacacgcaaaacccatactccattttcagaatccagcatcagtgggtagatatgcacgcccggtaaggcgtttttgattagcttttcatcattggtatgaattgtcagtaagaaatcttgatggttaataatatctggtaatgccatatgtgtgccctcttttcaattgctttcaataagttaactagttgtctttaatttgcttctacggtattagtgcgtagctcttctttacaaagcccttgctcatacgcccactgcaacgcatgttgcataccttgctgtaaggtaaattcaggttgatagccaaaaacacggtgcgctttttcactactatatgccgcactttttcggcttagcatgcgcatagttgatggattgatatcggtggttttaccaaaaaggtgataacaccactctataaagcccgttagttttagcactaaggacaagttcacaactgtgacgtgctttttcccttgtgcttgcgctaaataattaaaataagtttgattagttacttgctctgggcctgatagattaaaaatctcaccatttgccccctcgctcatggcactttgataaatgcctctcactaaatcatcaatataaacagggccgaacatgccctgtggcaccataaacgtgcctttggcgatttcttgcaatgggtaagctatccaaggctttgaaccagggccataaacatcgccaggacgaattattgttacattgagttttttactggcgtgatagcttagcgctaaatgttcactcatcatttttgagtcgttataggctcgcccatcaggtaacaaaggcgcatcttctttaatatctgtttgccaattactgccataaatggcagtcgacgaaatatgaataaaacgccttactgtgtttgctgcgaccgctgcatcaagtaagtttttcgtccagcctacattcgcctgccatgtttgcttgtaactaaacgcatttgaaacaattgccgcagtatgaataaccaaatcacagtcattcaataatgaacgccagccagcaggctcattcaagttacctgcaacaatattgaattctttagagggcgttaaatcaacgccgcatacatcgactccattcgcttcaaagtagcgcgccagcgtgcggccaataaagccattaccaccacttataaaaacttttgagtagttcattgtgtgttcctctaagcacgttaaagcctcaattgcatttagcaggccatttggttaatacattgttaaactttaatgacctttattactttactttttacgcaaaattttttactttttacgccagcgcactaaaaaagagcaaactatgcctcgcaaaacacacacacccgacctaattagagcatctgctttacatggctatgtcgaactgattgaaagtaaattagtaaacccagatgcactattagagcgcgtaggcttagacagaaaacagctcattgagcccaataattttgtgcaatatcagcagctcattgagttactagaaatcacagcgaaagaattaaacctgccctatttcggcctagagctaggtcgttggcaaagtctcaacatcttaggttcggttggttatttgatgggtaactgcgagactcttgaaatggcgttaaaaaacttaaccaagtactatcatattcatcaaaatagtgctgatctgttgctcgaaagtggccaagactttgtaaaactgtcttttttagtgcgcagtagtttaaaagtcggtgtatatcacggagcagacctagctctgagtgttggggttaatcttttaaaacaattaaccgatgaccaaataaaacttcaccgcctagaactgcctcacagctgtgatgcaaacaccagtgtataccgccaagcccttggtcaaataccagtatttaactgtgctcataccgcattagtgtttgagaaaaaatacctaaagttggccattaagaactcagataagcagttgttttctattcttagtcaacaacttggacacccgaacgagtctaaacgcgaaaatatttgtgaacatgttgaagtgcttataaaacaatatctacttcatgaacaatttggtgttaatttaatcgctgaaaagttgtcaatgagtgcgcgaagtctacagcgacatttagcccagtatgacacaacatttcgcgaactcgttgatgaggttcgttgcaatttagctcaccaatatttaactgaatcaagcctaagcttatcaaacatttcagatatcttaagcttttctaattacagcgaatttacccgagcattcaaacgctggtatggcatgccaccaaaagactatcgtaagtcacattgattataatggcgcaaaaagctaaaaacaggtcgtataaagttaattaattggttaacaatttatatatattgactagctagtttcgctaatcagtggtcgtgtaatgttaagaagagtgtttattaccggtagtaatagtggtattgggttcgaattagcaaagcaatatattcgtcgtggtgatgatgttgcgttattcgacaagcaatttagcgatataacaaagcaaaccttgtgtagccttgcacacagcaatcaatatatagaattttttgccacccatatctgcgatattgaagggttacaaatccaagtaaataatgcaattgccgctattggtaaacctgaattggcaatttattgtgaccgttcggatgaagtaaccaactgtgatcacgctcttgcactacgaaacattgccacagttataagcccagaactagcgatgaatagccaccttgcattaatgattcctgttacaaataaagctcaagtttcaccagaaccaagtgtattgatacttgcaaaggaactacgccaaacgtttaagccaaacaaaattaaactcagcttgatgtgtttcaacaaagcacataacgcctcagaaaatgctgcagacacagctaagcaaatagtaaaaagcttagataaacaaaaacgaatggtgatccttggcttacaatctaaactaacttatgtcatgagccattatttacctaattgggttatggactctgtaatggatcgcctcatcaaacaacaactaataagaacaacacgctaaggaacaaccatgaacacacatgataacctcacgcaattgatagaccaaacatgtcaaacctatgcagaactcccagcctataatagtgcgggtaaaacacttacttattcacaaatcgaacagcaatctcgttacttagctcagtggtttcaacagcaaagtaaccttaaggttggcgaccgaatcgcgatccaattgcctaatatagttgactaccctgtcgttacttatgctgcatttcgtgccggattaatcgttgttaataccaatccgctttatactgctcgtgaaatgcttcatcagttcaatgacgcaggcgtaaatgccatcgtaatactggacgcactaaccgataaactagccactatcattagtcaaacctccatagaaaaagtgattgttacttcagcggtgggtgaaccttcactgcaaccgggccaattgtcattacctgaactcattcaccaaggggaaaaactcgctccacttaaaccacaccaagcaagccgtgatgatattgccgttttgcaatatacggggggaacaacaggagttgctaaagctgcaatgcttagtcatggcaatatcttagctaatgccgagcaaatgaatgaacgctttgacgaaattttaacccctggccaagaaacgggtatttgtccacttccgctttatcatatttacgcctttacggtgaatatggttggcctattcgcaatgggacaatttaatgtgcttataccaaatcctcgtgatttagatgccttagtaaagcaaatagaaccatttgaaattaattacttttcaggcattaacaccttatttattggcttgtgtatgcatcctggttttaaagccctgaatttttcaaacctaaaaatgacagtctcagggggcgcagctctaacacacgcagctgctgatgcatggatgagcaccacaggttgcacaatcacagaaggctatggcttatcagaaacctcgccagttgcgacgttaaacgactttaaaaaagaagagattggcagtattggccgcccattatcaaacaccacagttgagatttgggatgaaaatgatgaacctgttgctgacggtgagtctggcgagatagttgttaaaggcccacaggtgatgatgggttactggcaacgccaagatgaaaccgataaatgcatgaaacgcggctttttcaaaaccggagatgtaggcctaaaactgccaagcggtaactacaaaattgtagatcgtttaaaagacatgattattgtctctggctttaatgtttaccctaacgaagttgaaaatgtactttgtcagcaccctgctatctgcgaagcggccgttattggtgcaaaagatgaaaaaaccggtgagcgtgtctgtgcctacattactttaaaagagcagattgatgagcaacaggtgagtgactattgccgcgaaaacttaagtgcttataaagtacctaaatcaatcatttttatggaacaattgcctaaatcgacggttggcaaaattctacgtcgagaattacgccaataataaagcgatcgttttagccgcctaactggtataaaataactacgagttattttataccagttaggcggctttaaggtcattatggaaaagtttattaatcacattcaacttggttacttaggtttactaccgtttttaggctgcgtaggctggccacttattgcaggaagtaatgccgtcaacttagactttttcactttttatagcatcgctattttagcctttatggctggtaacttatggcatgcaggccagcaaacgcatgctgatgctataaaagcgattattcctatcttacctattgggtttttaagttttctgccaacaccatgggctttaggttggttagcagcaagtttttggcttgtattattattcgagaaaacttcaccgcagtggcaaaattaccatgttgattaccagaaaatgcgatttgttttaacctcagtcgtttttgtttgtcacatctttgtaattggcatcagcatctatcctgagtagccctttagcccggtttgcggtaacatccgcggctcagtttcttaaggacttgctatgatagatcaattgcgcgccaaactagacctactcggcgaaaattacgttgaaaaaggcgctcactttaaaattaaagtgattccctttttttgtgctatccacattaaaaaagatcacaaaaaccaaggtactttaaagatatattctaatcagttgattgaaatatttttagccaccatgtttttgcttttcggtttaatgctctttgacaccgacgcagggtttacgcacggtcctattcatatcgttattgccgttttgattagctttaacttgatctttaaacaaattgccattgaagggctaaaaactcgtttagcgctttgcccaaaaaatgcagttgaaacagcgccagaacaaggcaaataacgacatgtttttagacccaagttggcgcattttgacggtaggcgatggtgatttgtcattttcgcacgccatagctcgtcatataaaaccaaccaagcttgttgcttcgacttatgatgatgcaaacactattgagcaaaaatatgccgacaatgcactaaccgcattgcaacaactaaatgtaactacactcactgaatttgatgtaacaaagccagactcgtggctgcacttagtcgatgcacgtttcgatgtagttatttttcaatttccacttatacccgcatttaaaggtgaggcagcatttaaagcaaatacccaacaaggtggtatgaatgttttaaaccgtgccttgttgcatcgctatctagactacgcaagccaatttgcattagataaaaacggcccgatgctgtgttacatcacctctaaagatgtaaaaccgtatcgcgaatggaatattgaaggcagcttaaatcaggggctaaactgccattatttaggccaaatgccattcgatattaatttattcccaggctataaaattcgcaatgttgaccgtgataaacatgtaaaagacaccagtggcattacctatgtatttagcgaaaaaactgacaacaacattactactaagctgactttacccgcttatttaggtgataagcactgtgcattatgtcgcgttggcccttatatggctcaagaagacgaagacaaacatttgttaagcaaaaagcacaaacagatggaaaaatttgaacaggattggcaagcatggcttgcacaaaacaacgaggagtaaccatgaactttgtgattgtaggtaccaattttataagcgacacgcttttgagcgcagccaaacaaattgaacaattctccttgtatggcgtttgctctcgagagcagcaaacaggtgagtctttccttgcaaagcacgacatgacagacgctaaagtgtttaccaatattgaacaagtatgccaagaccctctggtcgatgccgtctacattgcggcaccaaatagcttacacaaagactatgctgttatgtgtttaaaagcgggtaaacacgttttaggtgaaaagccttcggcagcaaacagcgtagagcttgagctgattatcgaagcagctaaagaaaatcaacgcttatacatggaagcgatgatgaccacgcatttaccaaactttgcgcgcttaaaaaatgctcttactaaaattggcgtacctcgcaaatatattggtcaatatagtcagtactcatcacgttacgataagtataaaaatggtgagcgcccaaatacctttttaccggagcttgctaacggagcattagtcgatttaggtatttatccgctgtatattttactcgctttatggggcgcgcctcagagtgtgaaagccagtggtgtgttacttgaaaccggtgttgatggcgccggcgatgtattattaaattatgccgataaacaagcagtaataagctactctaaaatctcacaaggcgataattttactgaaattcaaggtgaaaaaggccgtattcgtatcgaagctgtctctttattaaagcgtatgcaatatattggtaacgatggcacggtcgaagaactctctgagccatttgatgaacactttatgcgccatgaagtaagccactttattcaagcggccaatgcaggacaaattgagtcatcagttaatacccatgcactttcaaagcaagtcatggcagtgcttgatgaagcgcgaagtcagcttggtgttgtctatcctgcagataaaagctaatagcgtttaagggcaactattctagttgccctaacaaactcaaaattccattcttagtaatatcccttgcttgcatagcaacactaacactcgcttgctgaacaatatctagagatactttttctgccattacttttgcaaaatcagtatcttcaattcgctgatttgctgagcttagcatcgacgattgattagattgattgcgcatagttgactcaatagcgttcatttttgcaccgatttcagctctaaatccaccgatacgcgacaatgcagtgtcaattctggcaattgcattttgagccaagtcttcgctgcttatagtaatgccgtcaatcgttaaagagccagcactggcatcgatatcttcaaatataatataaccatcttcaccgaccgcttggtctgttgatgttaccatcattggaccatcacttgattcagcagatgatgaatttaaactccccaaagaatcccaactggcagtaattcgaaacatccccgagccaatcacagtaagaagcagcggctcggttacattatcaatgaatatttcttcatttgaacttcctgagcttgggttaccattccccgagtaggtaaagttcattccgttaattgtttgactatttacagctgggaaattaaaacctccccccgtaaataaattgccattgctatatgtttctgttccttggtaaccatttgctggagtaaatagatttgcttcaattctagattgcacagacgataaatcttgccccactaaatgctcgccagtttgggtaaatagatttaaatcatcattcgcaccattatcatttatttgaattctaacgttcgttgaacctgcaggtattaggcctaaagaaacatcccctgatctcattccttgctgaacattattagaaaacacctcattcaatacaggtacattatctaaattcgtctcttgctcaggcttagacattaatggttttttaccaaaaatttctgtattggctacaacgctgtttatatgatctcgtaactgtgaaaactcttcatttaacgcttccctatcgatatctgtatttgagccatttgcggcttgaagggctaaagttcgcatgcgttgaagcgagtctgttagctcggataacccagcatctgccacttgcccatagctgatcccatcttgtaaatttctaagcgtttgctgccttactgctatttgcgttgttaatctatggcttatttgtaggcctgcagcgtcatctttagcagagtttatacgctttccagaagctaacttctcataggttgaggtgatagattgcgtattttgcagtaaatttggcgttcgtagtcgtggcgaattgatcgtcaacattttgtcttccttggcaaaaaggctagacacagcaaaactcataccattttattaataattaagacttttaactttccttaaattaacctttttaataaataatcatttgtaacaatattttttgcggttgaaggttattgcactatgtttaaatcatgcattatttaatttgtgagaattagccttgtctatacgatttttattaagagcggtttttgcggctaccattacccttgcaaccggcctactcctcataattttatttctacaatcaggacaagaagaaagtatggagtcggcgcaacagcgttatgagctaagccaccttgctaagttttcatcttcaaattcgattcaccttacagaacttgctcgtcaacatgttgtaaccttagaccctcgctataaagtggaataccaaaatcttgttgatcaaattcaaggaaaagctgcttggcttaatggcgaaaagaaaagttatgtacagcgcttaagagcttttaatgtggctgctgatgatttagctctcttgcaaaaatccaacgatttatcactcaaactagtcgaaacagaagaacaagcatttagcttagtcagtgatttgcttggtcgtgatacaaataacttaaccgtaagcgaacatgaaagatgggtgcaagctatcgagcttttaaccaacgcggcttacatggcagaagttgagaaaattcagcaacccgtgaaagcatttttaagttcaattgagaaaaaaagtgccacagaagtaaaaagtaatcatgaccgtgtggtcaccttaagtttaactagcaccgttttagtgctgaccattatagctaccttgatagtgtgttactggcaattagagaaaaaagtgattaaagcaacccatgccttaattgatgaagctaagcgtatatctgaaggtgatttatcttgttatattgaccataaagctgatgacgaaataggtcagcttgcgagcacctttaacgttatggttgataagctttcccagcttcttaaagaaattcatgatcattcagagcaggcccaagtagcagcaaaaagcctcgatgaaatttcacgacaggccaaaacgttgaatgatattcaaagccaagcaattgaagtgatttcaagctctgtctatgaaaactcaacggccgttaaagaagtttcacaaaactgtgcagaagcagcaaacagtgcgacctctgccaatcaaaaaaccaaagaaggtttgcaagttgtacaacaaggagtgagctctgttgagtcagtggccgataccttaaccaaatcactaacagaccttaaccaactggaagtctcagtgaatgaagtaactgctattttaagtgttataagtaacattgctgaacaaactaatttactggcacttaatgccgcaatcgaagctgcaagagccggtgaacaagggcgagggtttgcagttgttgctgacgaagtaagaactttggctagtcgtacgcaaagctccactcttgagatccaagataaaattaactcgttacaaacggcaaccaatgctgtgacgcaaaggatccgcgcaagtgatacgcaaataaaagaggcggtggtaaattcagaaaaagtgggccatatgctagatgaaattagcgtgcaagcaaaagctatttcggatgctaatatgaccattgcttctgcatctgagcagcaatctcaagtgaccgaagaaatagcccaacgcttaaacgaagtacaagacaccagccgaaaatcacagcaacaaacgcaaagcatatcggattcatcgagtaaactggctagcttggcaaataatttaaacaagcagataaatcgttttaaattgagctaattaaaagataaattatgctggctttaattaacttaaaggcagcataatccaatctaatttagactacattttccgcaacttgacgtgttccgttacgcacacaacagctttatcgataatccatgtccatttaacgaaaaacatttcttatcccacaaaacatcagtaaaatcgccgcaaacttaagctcttaataattcataaggacagtgatgcaacgcaccatcccaccgttttttgttgctgttatttgcgtacttcttgcaatggttaccattcaatcgggagcctctgttgcaaagcaattatttcctgtaataggccctgagggaaccactgccctacgcttgggtttttcagctgccattttgtgccttgtgtttaaaccttggcgcgctcttccgccaatgggtcaacgcatgccaataatcatctatggcctgagcttaggtggtatgaacattctattttattacgcaattgagcgtatccctttaggaataggtgttgcgctggagtttactggtccccttgcagttgctttactttcgtcacgtaaaaagcgcgatttattctgggtagcctgtgccattgcaggcattattttattattacctgatatgaaaggcgaagacagcctcgaccccgtgggtgtgattctagcccttgcggctggtgcctgttgggcgttttatattttgttcggcaaaaaaacaggtaaccaaggctctggcgggatgacggttgctatggggatgagcgttgctgcgattgtacttgtgccttatggcgcagcttcacaaggcgcagcactcttgagctgggaagttctgccgcttggtattttagtcgccatcatgtcaagtgcgctgccatacactttagagatggttgcgctgcgcaatatgccagcacaaggctttagcatcatgatgagcctagaacctgccattgctgcacttgctggatttattattttagctgagttgcttagtgtatggcagtggttagcgattttattggttatcacggcttctgttggcagctcaatgtctcactcatcggagcaggatcagaaaagtcagaaatgtgattgattgactctaaaagagcctgtttttaatagtaaaggattaatttcaagacttaaaaacagcttttctcggcattcgtaaagttactgttctcactataatgctcattattaatacaaggctcacctttttgctttgtatcctaatgtactaactagtggaatatacgaatgtctaagaaaaataacttgttattatcgacccttgttgttgctggtgttatgacagcaagcaatgcaactgcaaatagctgtcagggcgagttgtttgcgatgaattcaggccgaggcgaacttggcattatgtttagcctagacgaacaaaataaaacagctaaagccgattcaatcgctaaatttagttcatcggctattgcttatgatgaaacaacaaaccgaacttattatgtttcatcacctattccactagagtacaaagttgatacctctcaccttaatattagtgaagagcaatcatcacagttgccaatccaaggcgaaaagtttaaatatagtcgtttagcgtatttagaccatgctacaggtgagcatgtttctgttggcagaacgagttctgttattggtttaacctatgatcctcaaactgactcattaattgcagttagttattctaagctactaaaaattgataaaaatacaggtagtacaactgagcttgcagactttagtgatgttgaaggcttaagccgagctgatttagttatcaaaaatggcgaacttttcctgatcactgcgacatcggtttacagtgttgatcaaagcaattatcaatacacaaagcttgctgaacacaacttagtaaatgttggtggtgcaacactgagtcaaaaaggtgacattatcatcagtcgctcagttatcaatgaccatggtgacaaaaacgaatcaaaactttataaattaagcccatacacgggtaaatcatgttttgttgcaagtttgcctgtacgtatcaatgatttaacgactaatacgcaaaatacgacggaatgttacacccaagcgccttgtttaatcgagaacgaaggtatcgcttattattcagaaaaagtgatggaccaactgggtgccaaatggaagtcattcgactttgctgaccaatattttacagcaccggctatcttcacatcggcgcctactaataatgatcctaatggtggagcgctaagattaaccaatgtaagcgacaatagctatgctgtctcatttcaaaaatggcaatacatcaaagatgcgcataaagatgttgagtcgtttgactttctagcaatggatgaaggccgttacactatgaatgatggcactattgttgaggttggcagctttatgttaagtggcacgagagaatataaagctgttgagttcaaagactcatttgcaaaacagccatatttgtttttacaagtacagactttcaatggaagccataccgtttatacgcgcgctgctaacctaacgagcactggatttgatgcagcattttacgagcaagaaagcttgaatgaaggacactttgctgagcgtgtttcgtaccttgctattttacctggctctggtacatctggaacgttagagactgttgcaggctacaaagaatacagtcttcacgaagctaatatcgatcatagtggtggccagattggtaatcacttctatatgcttcaagaagagcaatctcttgattcagaagtccttcactctagagagcgtgtggttgtaatggatattgaagaggtaagtcttgcccaaactgtaacgctaataggtcatgatacgtattctctgcgaagaaagtaaaataccccgaatttaaggcgccaactggcgccttttttgtgtttacttcatttgaatttcattaattggcattaaagcttaattatttttaaaaataacacctttcactactagctttaaaattagcttatttatagctttataggcgtcccagctaaagcaatcgaggttcaattgcagaagagcaactaagcaacaaatttttgcctaatatcactcaggtttaattacctaaaaacctttctcttaattagccgaattaatataagcacctcaaaagcatttcaaaaaactaatttttaaacttatttgtattaacataccaccatttgcgataaatggtgatgatagttattatcatttgtgataacttacccacaaatagtttccttatcaaacacaaaaaccctaaaaaccagctaaataacacgcggagataaaaatgaaattcactcagttgcctgttgcaaccgctattctttgtgcactttaccctcaaatcagttttgcggagcaaacagctgacgtagaggcaaagctcgaaaaaatcgaaattgttggcatacgtcaaaaccgtattagtgaaggcgcaacaggcttagcattagaaattgatgaaacgccgcaatcaatcagtgtgatctctgctgagcagctaaaaaattattccgcttttaacattaatgatgctttacgcttagccccgggtatcaatgttgaagaatgggaaacgaaccgtaccaactatacatcgcgtggttttgaaattaagaatacacaaatcgatggagttggcttaccgaatgactgggggatcgttaccggcgcaatggaagcatatggctacgaaaaaattgaagttattcgtggtgccaatggcttactcactggtgtaggtaatgcatcgggtacgcttaactatgtacgcaaacgccctaaaaacgaaaacggcggcgaaatcggtgtctctgttggctcatgggattttaaacgtttacaagccgactactcacttttattaaccgaatcaggtagttgggctgctcgttttgttgctgccgcagaaggtaaagaatcatatctggatggccttgagaacaatcgcgagtttttctctgcagtggtagatggtcagcttactgataactcaacggttactttaggttactcatatcaagacgcagataccgatggcaatacttggggcggccttgtttataactacacagatggtacgcaagctaaatgggatgtcagcgacacaaccacccaagagtggacaatgtgggacaccattaacacctctgcatttgttgaatacaactatgtttttgcaaacgcatggcagcttcaagcgagctacaacttccgtggttttgaagagcaagacaaactattttatgccagtggcagcattgataaagacaccaatcttggcctaagtggttggccgggtcgttatgatagcgaagtggatgctgatttatttgaaatcaaagcatttggtgcctttgaattgtttggaaaagagcaccaagcaagctttggggtaagccacgctaaaagtgatgatgtgatgtatcaacacccgtttgattttgcaaatacaccggcttatggaccaacgcctgcgttcccatacgatttagatgcgatcccagaacctgattggttaacaccggttctgtattcagatattgaacaaaagctaacccgttactttggctcggctcagttaaatattactgataaattatttaccgtggttggttttaacgctattgagtttgaacgctcaggcatgaatgctggtgcatctatcgataatgatgagagcgagacaagcccatatatcggttttacctataagttaaacgacgatttaaacttatatgccagctactcagatatttatcagccacaagaacaagctgattacaacggccaatatttagcaccgaccaaaggcactaactttgaaaccggtgttaaggcttcttggtttgatgatgcccttatgacaacatttgcctactttactgctgagcaagataactttgcgcaatacgcgggcctcactgaagatggtatttattactatgaaggcgtgtctattgagtcagaaggctatgaatttgaagtcactggtaaaatcaccgacgctatgaatatcgttgcatcttatacacatattgatgtaactgatgaaaatggtgatgacactaataaatgggcacctcgcgatgttgtcggtgtaacagtggattatgcactaacagatgcagtggtggttggtttaaatggccgttggcaatctaaaatcgaaagcactgattacaatgttaaacaaggtagctacgccctactaaacgccttcgcacgttggaatattaatgaccaagttgcagtacaggcaaacgttaataatattactgatgagcagtacatcaatagcttacaaaccgtgggttattatggcgcgccaacaaacggtagcctcactctgacctataagttctaaaccctgcttagaaaaaagtgtcgcccgtttgggcgacacacatctattaattagggcaattacctaattcataatacccagcactggtttgcgctaaggtactagtataaaaggtgttataaagaccaaggttatcacctgagcccaccgcataggcgtaagagccattcgtagttgcgcggtttgcttgcacatgtgcatagttgcttgaggtggtttcagtgcattggtaatcaccattcggtgttgagtcacacgcatcacccacaccatcagcatcactatctaactgatcactattggccaccagcgggcagttatctaggctatcactgacaccatcgctgtcggagtcactcgtttcaccattaggagtactgtcacacacattaccaatcccgtcattatcgttatcggcttgatcagcattcgctacattcgggcaattatctgcgccatcgagcacaccgtcgttatctgcgtcattagtcggttcggtggtggttttgcatgcctgcaatggcccagcacaacttgaatcatcatcagcaatccactgacattgatttgtgcccgcagaatactcgcgcatagtaaaggctgcggttccaaacgctaaataacaggcagaataaccttcgccccagctaatatggccttcgttgatatgaagattgtaatcgcctgtcacgccagcatcgatgacaaaactaatgctatctgttgatgtcagcaaagtatcatcgctcgcggtgatcactgcggtattattgccaccagccaaattgcattgctcagcaaagtactcaagcccatttactgtagccgtcacatcaccattgctaaaacttaccacaacgctacttaagttttgattatcatcaatcaccgtgcccgttactgtagcgcactgcccgtttacacttgccgcagtatcactcagtaccggtgctgtagccgcaggttctggccctacacgtaccgtaagattagcttcatcaccttgtttcgcttcgttatctgtagcacttacacgcacttcataaagaccatcgctgagtgcacttgtcaccccgctaaaggtattattcgcatcgacttgcacgttcagtgactcaattaagcttgccgcgccaccagctaggctatacacgttaatatcaacattcgttacactgccttctgggtcgattgcactgccagtaatggtgagctggttattactgtctgtggcagttaaattactaatttcagggccttcattacgatcaactcgtttattattagccgcaaagtactcaccgagataggttgcaaaattaatgctgtttgccgcaacataatcgccagacgcaccttgcccgcccgaccacgaatgatccaaattattaaaccacagcatagcaacccgattgtcttgccaaagtgacagctcagcggtacgcgttgcatcatcacttattgtcgtcgtgcctgaaagttgattaaccccataaagcgcagcaaagccatctgcgttttgctggttataacaggtattgactgtggtatcggcagtgccgtgacctattgccgctatttgggtggcaaaatgatctttataactaccagcatagctttcacagcgggatacaaaggtgttttcagacactgtttcacaagtcgaaattgccccacttgaacttgtgccgatggtcggcccggcgcttggtgcaaccccggcaaatacatcaggcgctacacaagccgtttgtgcagccattgccgccccagatgataaacctgcaatgtacacttgtttagggtcaatatttcgcgccgcatcaccacttaatgcattggctaaattaatcagatttttataatcgccagagctacgattgattgctccttgccaatatgaccagcagctatagcctgctttattcatagcatcaggaacggctattaccatgccatgggcttcggctgcatcttcaagattcgctgttaagtagttattaatgggttgtacgcagccatgcagtaccagcatcaaagaatggccattgcctatgcttgattgcgtatcaggagtgtaaatatgaacattattaaaaccgccgatgctgacattttgctgccaactccctgcaaaacttggctgtgagaaaatagcagcacagagcactgcgagcggagtaaacgaagctgattttcgtttacataattgtgttactttttgcatatatcgcctttatagttgttatcattgttgtctgtcagttgatgactaacccaatgtagtagaactattaaaaaagcgaactataactatagtgctatacaatcattaaaaaacaacccaaaagtagcgccactcaatttattgttatttttaaaattaaagtcaattatattaacaaagccaacataactcgttggctttgcttttgctaatgaagagcttaaaaattaaaccctactgatagccaataacgacgaccatcttcaacatagccgtattcagcttcggtaatttctttatcaaacaagttataaacaccaaatcctaacttaatgctgcggcttaaatcgtagttaccaccaatatcagccaaggtgtaatctggcgcaattaagctgtcttgcgatgggcctgttgtcggctggctttcttcaccgcggtaatgtacacgcaaccaggtgcctaatttatcaaccgggcgccaattaactgaagtttgtaaaatatgcttaggtaattggttaagtgggctgcctttgtattcaccggttttttgctcagaatcggtgtaggtgtagttggcactgacatcaagctcactggtaatgtcgtaagatactgataactcaaagccttgcgtaacggcttcatccacattgacataggtcgttggcattgaaccaaactggtttggtccatcagtacactgagtgagtgggcacgaaatacgggtaattttatcttcaaactcgttgtaaaatacggtgcttgaaagcgataaatcacggctggcatcatagtagatacccatttcgtagtttactgatttttcagggcttaaatctgggttaccgtaaatattaccacctcggctcacttgcccccaggccgcggtagattgacgaatattcggcgctctaaagcctgttgagataccgcctttcaccgtcaacgaattagttgctgtatacacaccatataaacgcgggctgaaatggcctgaaaaattaccatcatggtcataacgaagaccggtagtgagtttaaattgcttcgttgctgcccactcatcttctgcaaatactgaccactgctcgttctcaacgtgcgttaaatcactaatgcggttactggtataatcgtccagctcttcttttaaatatgacgcaccaaatgctgcattatgattggtaaacggtaaagtccaacttgtttgcgcatcggtattttcgacgtacatttcacgagaggtattatcgaatttatcgtactttaagtagctgcgtgatgagccaaaatcataaaagccattatggcttagtgagtagctttcttggtcatattctgtggttgatgactcagggcaaccatttcgaccacaactttcgccttctgctaaaggagcaactgttttacctaatgtttcgtcgagtttttgttttgcagagccgacttcaagcatgatttcgtggttatcagagggcgttaagataaactttgctttgatattgctttgctctttaccacgaaaaccggcttcaaaatcgtcttcgtcacgttttgagaactgacccgataactgcatacctaataactcaggaattaagccacccgcagtaaagaaactaccttgattaatatcacccgattcacttgattcttgaatggtgctatctaaacgtagttcgccgtaccacttttctggtgttttacgggttataatatttataaccccaccaatggcatctgagccatataacgacgacatagggccacgaataacttcaattcgatctatcgctgaaataggcggagtccatgccccttcaatacctgggccatcactatttggtcgtgtttcacgtgaggtttgacgctgaccatcaattaaaatcaaagtatattgacttgccataccgcgaagactgatatcttttctgtcgccaccacctgtaacaaccacaccgggtacgtcagtcatcgcatcggttagatcacgataaaaacgtttttcaagttgttcacgatcaataacgctgatactggctggcgcctcttttagcatttgctcgtaaccggaagccgatacaacgatgacctccatgtcttgttttttgtcatcagcgtatgcaaaatgggaaagacctgctaacacagcagcggtgagtggtaaaacagaagaaacaaccctcgtcataataatactccgtgactttttgtttataaatgataataattagcgtttgcatactaatgagaagtcccgattttcacaatttacgatttcttaaaactgaattaagaaggcctgaaccatgaattccaagctgatcaaaacattgcgtgtattttctcgtactgttgaaacgggcaatatgagcagtgcagcggcagagttatcgatgaccacatcggctgtcagtcaacacattaagcaattagaacaagaaatcggattgagcctatttaaccgcagccctcgcgaactcactttgaccgaagctggccacctgtattatcaaagctgtttaaaaatgctagcactggcagatcaagccagtacgcagttacaaaatctacaaaataagccaagtggtgagctcaaattagttgcgccggtgggttttggtggtggattgctaagcgaaccactagatcgcttaattaacgagtttgatgatttacgtattcagttaattttgactgatgagccaattgatatgatcaaatgcggcgctgacttagcgattgcgattggcccattaactgactcaaatctcgttgctcgtaagttagcaacttggccgttaaagttatgtgctcataaagatcatgcaattagcaaacttgataaagccagttgggatgaccttggtaactttgcccgtattgcacacagcaatgccgacagcaacgcgtttaacccattaacgctggcaagcaagccattaccaaaagcaaagatcaccgtaaataatatgcaaagcttaattaaattagtgtgtgatggtgttggctatggcgtgctaccagagccagaagtaagacatttactaaaatcgaaagagctggttgaaattgcacccgaatgggcaatgccaaattacactgtttatgccgtaacacctgccagagacagcttagcggcaaaaacaaaaactgccattgatacgttaaaactgtgctttaaccatgtgtctaagcaagttgagttagttgattaagacgctacaaggataatacccatttgccgtattcggatgggtatcatccaaattagtattaacccagcgccagccaaacgcccacacacatcattagcgcgccagcaatacggtgtaaccacttcacattatcgcctttatctaaaaacagccttaagctctttccgcctgttgcgtaaatcaacatacagataaattcgctcagcataataatgctcactaataccgcaagctgaggggcaaccgctaaatcaacattaataaatggtggcaataaagaaatcataaatgcccacccttttgggtttgcaatggcagtgatataaccctgcgaaaataattgcccacgaccaatttgttgctgtgtatcatcgttaggtttaaagctggttttagcgcgccacatattaacacctaggtaaattaagtacgcgccacctaggtattttaaaaaggcaaataagtcagggtaattaagcataatactggcaaccccaatcaccgcagcaatggctaccgtggcaacgcctaacacctcgcctaccatcatccaaagcgtacgtctaacgcccacactcatccctaacgtcatggcgagcgtcatacacataccaggtgtaatagaaacaaagaaaaaggtcggaataaaaaccgcgagtactgctaaatcgagcataaatgcaatcacatgtttattgcttaaaaagagaaagcgattaaatcacattcacttaaataagcaaacaaacacgcgattgctaacaggcttataaaaacataccgcccgatgcttcaatgcgttgcccggtcacccatcggttttcatcaccgagtaattgcgcaatcatagggccaatatcatcagcttggccaacgcgtcccatagctgtaaatgaactgaccaattgagctacatgctcattatcacggacagcaccaccgccaaaatcagtggcaattgcaccaggtgcgacgacattcacggcaatattgcttgcagcaagttcttttgccatgtatttggtcaatacctcaacggcacctttcatggtggcgtaggccgcttttcctggtaatgcaaaacgtgtcagccctgaagataagttaataatacgcccgccatcattgatcatctcatgcaatgtttgcgttaagaaaaacacaccttttacatgtacattcatcaaattatcaaacatagcttcgctggtatcagcaaatgcactgtcactgccatggcctgcgttattaattaaataatcaaatcgagatgtttgccattgtgttgttaaggtactttcaagtgtttgtttgaattcagcaaaacctaatatatcgctcacatcaagttgaatggcgacggcttttgcccccagtgcagctacttcttctacaacctgctgtgcttcatctttatggcttctgtaagtaaatacgcaatcaatgttcttacgtgccaaacttaaaacagtatttttacctaaaccgcgattaccacctgtgatcactgcaattttgttgctcatcgtgtttacccttttgctttgaagtaattgtgagcaaccagtatatttacactgcaaattcagataaaccatgtaaaattgaatcaactgttcgcaaataacaaacaatcatgaatgaactaaatgccatgaaaacctttgttcaggttgcagagctaaaaagcttttcagctgcagcacttgcgttgagcatgcctaaatcatccgtctcgcagttggtcaaacaactcgaagatacgttaggtgctcggcttttaaaccgcacaacaaggcgagttacgctgaccaacgaaggcacggttttttatcaacgctgtaaagatatgcttgctgatatagacgaactacaaaccctatttcataaaaaagacgaagcgttatcagggcgtcttagagtagatatgccacagccaattagcagacgtttagtgctgccgaatctagacagctttttatctgcacacccgcaattagagattgaactgagtagttcagatagacgagttaacctaattgaagaaggctttgattgcgtagtgcgagtcggtcaattagaagactcatcgctgattgcgaaaagaattggccactgcccgatgattaactgtgtaagcccaggttatattaaaaactatggcaacatcacaaaacttagcgatttagccgagcactacattgttcgctatagccaaacactcggtcgacttgaccccggcttcgaataccaagatacacaaggcgattggcaaaccctcaccatgaaatcacagctcacagtcaacaatactgatgcttataaagcagcgtgtttagcagggcttggccttattcaagtgcctcgtcatggggttctcgacgagctcagccgtggtgaacttatccaagttttacctgactataatttgccgcccatgcctatgaacatagtctacccaaatcgacgtcatttaccaaggcgcacccgagtgtttattgattggttaagcgagcaattaaaaccgattatcaaacaaaaatgataagcgttcatcagctttagatggcgttaactcaatgatttcagatttaactacattttcgattacaaaaggatcttcagctataatttcttcgatctcctgttttgaaacatcgactgcaataatgccgccgcctgcgttaggctgcaagcttccagataatacaaaaatacctttatcaaagcctgtctgaagccactttttatggccttccatgaaatctttagcttgagacttattatcagaaaacgttagttgaattataaacatttcattattcctttaatgtattagtgaactcactttcaaattgctgtagcaattttaaacaaaagctgaaaattaaaaaataaaattagaagcttaaaccacgttcgtgtaaaaatggcggtttattattgactcaattcaaccaatccaatgagtgttttttactcttcattctgcttttgtgttataagaaacaaagcactgaaacctatagaaaattccaatataaaatataaaattaatagccagtggggcaacccgtctaacatgaagcttaataacctacccattgctaaaccaagcataaatatagataacgcgattaatgcaatacgacgatacgatgctcttacaacccctaaaagccagaacgccaaattaaatatgtacaaaaacatgacagctctaaaaatatgattgccattaacattgtttatatctagctcaaacaggtaatttagacttagctcaggatttactccataagaaagagctataggaattaagccaaaagacgcaataagaagtaaggcacaacttttatctattttcatctttaccattggtcaaatctcttagtatgaaaatttagttccggccgatactcaccccacaaccagcatcaaaaaccatatacatgactgataactagaacatcatttatcctagagttggtaaactgcttgtttcaccattcagtctaaatctactaccacttgacggacttagtaagaatattttaattaatattggttaaatcagaaaaatcttacattctcatgcttatgatcatttgccagtttttaaatataaatcgataaaagaatatgcaagtagccaatacaaaaatccccgcttaaagggcggggatttttaatataagtaactaaataattactgagtgtcaccttcaacggcaactggctcttcgggtttttcgtcacttaataagtatttatctaaccactgttcttgctcccaaagcacatgtagcaggctcttacgagcgcgatagccatgcgcctcataaggtaacatcactaaacgagcctcttttcctaggccttttaatgcagcatacatacgctcgctttgcattgggaaggtacccgagtttggatcttcttgaccgtggatcatcagcataggctcattgattttctcagcatggaaaaacggtgacatcgccgcgtaaacatcttgtgcttgccaaaaatcacgctcttcaccttgaaaaccaaatggcgttaatgtgcggttgtaagcaccactgcgagcaatacctgttttgaataaatcgctatgcgctaataaattcgccaccataaaggcaccataagagtgaccggcaatggcaattttgtctttatctgccacacctttttctacaagtacatctaccgcagctttagcacttgccaccagttgcttacggaacaagtcgtttggctctttaccgtcaacacccacaattggcattttcgggtcatcaaatacggcaataccttttgcaagataaggcattggaccccaataaccgatataggtaaattcatacggcgattcgcgcatttgtgacgcaacagctttatctttatattcaagtggataagcccacattagaactggtaacgggccttgagttgcatcataacccggcggcaaataaagcgtaccacttagctcaacgccatcgtcacgtttgtatcgaattaactctttagtcactcctttaaattctgggtaagggtgctcaaaggtcgtaagttgagtgagggttttatcgtctaagtcgcgaataaagaagttaggctgctcagttttagattcacgaatggtaattaaacgttcgccttcgtcatcaagcattgcacgcacacgctcatagtatggcgcttctgactgccaaacgcgtgttgtggtattggtttttacatcataacggtctaaaaacggaatattgccttgttcagatgcaccgttaccgcgtaagaaaaggtaacgaccgccaaccacttttaatacatcagcacctaagtcattcttttcataaattggatagccgggatctttgtaggcatcgttatagctacgctcagaaaatagcacgcggtttttatctgcattacgcggttgaataacaaaaactcgtttttgtcggtcgctaaagcgccactcagataacaaggctacattgccattgccccaagcaattgagtcaaaacggcgttcaactttggcaaataacttagcatcgcgtttaaagggggcttttaggctataaaggtgatcgtgataaggcacgtcgtttttcatatcgccgccgtcttgggcctcagcccaaataacctcagccccttgatctgctcgccattgaaaatcacgacgaccggttctaacactgtcatagccttgtggaatgttatcagctaaaggctgttttgcgagctcagctaaagtataaccacgcatcccccaaatttgccatgtagcagcaaaacgactgaaaggtacttgatatgaaaaaggctcatcaatcataccaaccaaaatgttggttgaatcaggcgacaccgaaaacgctttaattaacccaggttgaccaatcggttggccctgaccactgagcggaatataagttaattggctttgtgcgtaaaacttaaatagggcttcatcaaatgggctggttaataagttttgataagttctcgctggtgctttctcaccactactttgttgaataacaggcatcacttgcgtgctatcgtttgttaagcgagctttaccaatattaaccgctgcattagcaacaatggcgctgctatctggtagccaagtataaggtgtgctggttaaaaccgaattaagcgaggtgtcacttaactgacgggcttgtttagtactaacattataaacccataaattagcactggatgcttgctcaaccacaaacgctaagtactgactgtcacttgaccaacttggtgagcgtaaaatgccatttggcaaacccgatacaacaatttcagagccggtttcaacatgcttaagcactaaagatgtaaacttattacgcactcgtgagcgcgaaaaattagcagggttaagcttaatacccgcaagttttaactcttctttagccaagtcttgtagtgtatcaatgcgttttctatcaaataacgccagccactgaccatcatttgataaataactactcggcgcaagcttagcgtcaaccacagcagctagcgctggcgatggagtttgataaccttgattagcaaaactgggtgtgcaaacagctgcgccaatgactagcgcaaaaagcaatttaaatgctttcatgttcgttcctttttcgtttttattttcgattatgtaaacaagtagaacatgtttgcagcatttcataaagagtttcggctcttttggcagccaatcagtgacttaaacacctactttaagctaaaatagacacacgctattcaccacttttgctaataaaaatgaaaaaatcgacaggcaaagtcactatctgggatgttgctgaacaggcacaggtttcaaaatcaaccgtgtctttggtccttaccaacagtgataaggtcagtaaaaagagtaaagaaaaagtgctggcagccattgataagctaggctatgtgtataaccgtgatgcagcagcgcttcgcagtaaacgatctaacctagtcgcgttggttataaatgatttaaccaacccctactcagctcaacttgctgttggcctcgaaaaacacatttttgagcttggtatgttgccgatgctggtaaatattgcagagtgcgtagaaagacaaacccaagtggtgaaaaccttaaaagaatataatgtagcagcatttattatgtgtccggctccgggcacacagcagcagtggcaagatgatctcataaatagtggttttccggttattaatatcatgcgcgaaattccattttcatcagcgccgtgtattttgcctgataacaagaaaggcacacacatttcaaccagtcatattttatcgcaaggtattgaagatatagcctttttaggtggcaccgcagaaatatctgattaccatgaacgtttaagtggttttttatctgcgctggagcaatttaatatcactgacgaaaaacctgtaattcaagcgccgaccaatcgccaaggtggtcgagaagcctttaatacccttataaagcaagctccaaataccaaagccattgtctgttttaatgatgttattgcctacggcgcgattgaagcaatgcgtcaacacggtctcgagccgggtaaagatatcaaagttattggctttgatgacttagaagattcgcgcttaatgctgccttctctttcgaccatcgctattaatgccgacgagatcggtaaacgcacctgtcaggtgctaaaagaactattagataaatcaacacccccagttcgcaccttggtggatgttaacttaaaaatacgagactcaagtcaatgaaaaaagtgttagtgatcggctatgtttggcctgagcctaattcgtctgcagccggcacccacatgatgtcactcctacgcgcctttcgtgcagaaaattggcaagttgaatttgcaagcccagcgcaaaaaaccgaacatatggtagatctcagcgaagatggcatcaccacacaggtcattgcattaaactgctcaagctttgatgagtacgtgcaagcgtataatcctgatattgtgatgtttgatcgctttatgatggaagagcagtttggctggcgagtcgataaatactgccctaacgcacttaaaattcttgataccgaagatttacagtgcctcagaaatgcacgccacgaagctcacaaagcaggccgagaattcagccatagcgatttacacagtgatattgcaaagcgagaaatcgccgctattttacgctcagacatcagcttaattatctcgcactacgagatgcagctactcaatgacgttttcaaagttgatagcgccctacttcaccacttaccatttttggttgatttgcagcatattcctaccagcaccaaagcatttgcagagcgtaaacactttatgaccataggtaattttcgtcatgcgccaaactgggatgctgttttgtacttacaacaaatttggccgctgatccgcaaacaattgcccgatgccgaacttcacatttatggctcttacccgccaccaaaggcgacagcgctgaacaatccaaaaaccggtttcttaataaaaggctgggctgatgatgcctacaaagtcatggaagatgcacgcgtgtgtttgtctccactgcgttttggtgcaggtattaaaggcaagttactcgaagcaatgatcatgcaaacaccaagcgtaacaactccgattggcagtgaaggcatgcatcaaaacgagccgtggtcaggtgcaatatgtgaagatgcacagcaatttgctgatgcagcagtggcactttatcaagatgaagcgttatttactcaggcacagcaaaatggccagctgttattgcaaaaatattatgataaatcaaaacttcagtcgcagttaatcgctaaaatcaccgccattagtgagtcattagcacagcatagacagcaaaattttaccggccaaatgctcaaacatcacaccatgcgatctacccaatatatggcgcaatggattgaagctaaaaataagtaattttgccgtaaataacactagacatagcggcttttgtcgctaaaatcgcgctggtgaatttaagcgatatagtcttgctactagactatatcttattgaattttggtctatccttaactgaacaatttaacctttggttcaaaacgcctttgaaaaccgcaacgtttactgaaaaacgaaaatttatcgtgaagcttggcaaaatgcttcataaatacggtacacctgcttaccgactagaagcgcacttaatggaagttgcgacttacctcggcttaaaatcatcttttgttatgtcgccaacatcagtgacctttgttatttggacagatggtcacgaagaagagtacacccatgttgcgcgtgttgatccgggcgatcacgacttaggctcgctggcagataccgatgatttagtaaacaaaatgcttaacggtgagctaacgctacaagaggtcgataaacaactcgacatcatttacaacctgccaaacccgtataataaatttatgaccggcgttgcttttgcaacctctggcggtgcatttgccatgttaatgggtaccggttggaatgatgtgttttggtcagcactgatcaccttagtggtgtacttatttgtgctttggtcaacacgctcaaaacgcgtcgcgcatatgcttgagcctttagtggccattgtttctgcaattatcgcgtgtgcggtcagtgtttacctagacgccgaaataaacatacgattggtggtgctatcagccatcattgtgtttatacccggcttagcattagctttagggttagctgagcttgcagcacggcacttggtgtctggtacagcacgggtgatggactcattcatgctgctgtttaagctgtattttggtgcttttattggtattggaattggtttcgctatgtttggtcaagcagactacgtgcaaccagagcctttaccaaaatggacagcatggcttgctatattcatgctatgtagcagcctaatcgtgatttttagaaccaaactaaagcatgcgggttggtctattgcgtctggctttatcgcctatggcacaagcattggatctgccatgtatctagactacacacttggcacatttgttggcgctttatctgtaggggtttttagtaacttgtttaaccgtgttgctaatgcacctgcctccattgttgctatgcaaggtttaatcgtattagtaccggggagtaaaacctatattggtttgaactcattaattgaaggtcaagatttcgtctatgcagagcatattggccaacaaaccttcttgatatttatgtcattagtggcggggcttatttttgctaacgtcgcgcttccaccaaagaaaagtctataatctactaagcccgagtttatcgggcttttttacaccctcgttttaataagccgactttgcttatcagtaacaaactgatataactcataagtgcatgtggtaaaaataaaaaggatttatttagtgataagattggcttggctgctatgcagcttgttcgcatttagtgtgtttgcagaatcccagtgtgttaactgtcatcagagccaagttgaagactggcaaacatcccatcattttcatgctatggaaaaagctactcccgcttcggtgcttggtaatttcaatgatcaaactctagactaccaaggccaaccagcgcgcttctatcaacaaggccaacaactttttataagcatgccaaaccttgatggcaagctgactgactaccctgttttatacacatttggctatgagccactgcagcaatacatgtttgatatgggccaaggccacatacagctatttccgtttgcgtgggactcacgcagcaaagcgcaaggcggtcagcgctggtttgtattgcatcctgagcagaaacagcacgacctatttcattgggcgcaaaaaggccaaaactggaatcatatgtgtgctgattgccactcaactgatttcaaaaagcaatttgaccttaaaacgaatagctttaactcaagttattcaagcattaacgtgagctgtaaagcgtgtcatggcgatagcaaagctcatttaaaatgggctgatggcgatagcagtattgccgataagggctttacccataacattaaaaagcaaaccccactgtttactcaacaagctgatggcagtatgcaaagcgtacagccactggtaaaaagcgagcaagtgcaagtgtgtgcaacctgtcatgctcgccgttcacagcttgatgaccgcaaagacccacatagctttttacaaaactttcaaggctcgttactcactcctgagctttatcacgttgatggtcaagtatgggatgaagactatgtatggggctcgtttttacaaagtaaaatgttcaatgcaggggttacctgtactaactgccataaccctcattcgggtaaattaaaactgcctgggaatcaaacttgtacgcaatgtcatagccaagaggtgttcgatacacctaagcatcacggccataaagtggcaagtacaggtagccaatgtgtcgattgtcatatgcccaccactaactatatgcaagtagatgcaaggcgcgaccacagctttcgagtacctcgccctgatttaacgttaaaaaccaatgctcccaatgcctgtaatagctgccatgaagataaaacgccgcaatgggcggtcgccaaaataaaagactggcacccaaattcaaaatatcttggtactgcgcatttttctgaggcgttttatgccgccgataaccgcctacctaatgcatcgaccatgctgactaaaattgtgcaagataagggctttcctgagattattcgcgcatcagcgctcagccgcttagccgcaagccccgataacaatgctatcgttgcgattgctcgctcagtaaaagacaacgagccattgaaacgccaagcagccattgaagcggcaatgccttttgatatcaaccaacgctggcgcctattaaatcctcttttagatgatgaacatttaccaatcagagccgaagctgcaagagcacttgcaggtatgttaactcagccgttcccggcggggctcaacgagcaagacagcaaacgtttaagttcagcccttgatgagtacaaaggcattcaacagtaccaagcagagcgtggctactcgcatactaatttagggaatctggcgctcacattacaaaagccagaacaagccaaagcacattatttacaagcaatcagtattgaacctatttttgctcctgcttatgtcaatttagctgatttatatcgcaaccaaggcgatgaaaaagcagcgcaagctatcttaaaacaaggcttaggcgttaacgcagaaagcggcgatattcattatgcccttgcaatgagccttattcgcacaaaacaaaaagacaccgcccttacacatttacaaaaagctgcacagtatgcacaagaaaatgcaaactatcagtttacctacgcattactgttacaagatttaggtaatatgccagcagctatatctgcgcttgaacgcgcctttaatctgactccgaataacccggatattagctacagtttggcgcagtggtatgtggcagaagaaaactacagccaagcgctgttttatgccagaaacctagcccgcttggtaccgggtaaccagcaaattgagcagtttgtaaaacagctcgaaatgatgaatagtattaatcattaagcattaaaaaagggccaagtaggcccttttcaacttaacttatggtcaataattaatgaccatagtttagtgattttgctttttcgattgcttcattcacgttaagagacgctgactcttgacgcggtgggaactctacaaaagattgtacatgttcgtttaacttagcaatgattggctgtagcaaccagctcttacgcatgatttggtgaaatcctgttactccatcatagtgctctaatggatctttacgtaagttaaatagtttaggcatactgtgcgttaccatatcatcgtaatataaccctgttggtttggttgcaaagtgcattttccacgggccaaaacgaacagctgttagctgtgattcatagtagtaaaagaagaagttacgcgccgatttatccgccttaccagtccagtacgctaagttattctcaccatcaatataaactttatctgactttttaagcttttcacgtaagttgttctcgccaagtgctgcggcaattgttgggaaaacatcttcatgcgatgaaataccatttagctttaagccttttggtattttgtttggccaacgaactaagaaaggcacacgcacgcccccttcccatgttgtcattttttcaccacggaacgatgttgttccagcatctggccaacttgattgctcagggccattatcgctggtgtaaataacaatggtgttatcggcaatttttagctcatccagtttatccagcagcttgccaacatgaccatcgtgttccatcaaaccactaccaaaaatatcttcttcagagctaatgcccgtcgctaaattacgactttcaggttttaagtgagtgtatacatgcattcggcttgtagcgtgccaaataaagaatggctttttcgctttaactgcacgctccataaagttaagtgaacgctctaacacttcttcgtcaaaggtttccatacgtttgcgagtaagtggacccgtatcaatgattttgccattggcgtaagattcgataacaccacgtgggccaaattttttcacaaacttaggatcttttgggtaatccgcttgctctggctcttcagatacatttaagtgatacaaattaccgtaaaattcatcaaagccatgctttgttggtaagtgttcatctaaatcacctaagtggtttttaccgtattgcgccgtcatataaccgcgatcttttaaaaattcagctaaggtaggatcggcttctttaataccaagaggatttcccggttggcctaccgttgttaagccagttcgaataggtaattgccccattaaaaatgcggcacgacccgctgtacaactaggctgagcatagtgatctgtaaacaacgcaccttcgttagcaatgcgatcaatattaggggttgggtaggtcataccatgtgagtaggcactgagtgaaattggcgcaacgtcatcaaccataatggccaatacgtttggcttatctgacgctaggcttactgttgaaaccaagctgcaaatagccgccgctattagttttttcataaattatccctttttattaatagtactatttactcctaaagagctcagtttagtataagatgaaaacaaaatacgtctagtttctaatctagtaaaaaacgatttaaatcaattattcataaaatcaaaacttttttattaaagtatactctctactgtttttactagggtagccattatcataattaaacccaaacccactttattatattgcagcgggtagattctaaaccgctatattcatttaaaatactccaaattatttagcggcttgatgattgaattcaataaataaatagactataagtaccttaagaattagtaagcaactttttattacttgtgtaaggaaaacacatgccttttctacgaatttcgttcttattttcacttgcgtttcaactatcaaatttgtcagctaatgaaaaagaagtacaagatatgtcggacccacttgcggtatatacccaaataggcgcaggctcaactaacaaggggattaaccttaaagtaggacaagcctatgacaccggtataacaacaactgctggcatgaatgttatcgaagtgaaagggatttacggtgatgcgctaggctgggagagtgataacaaaaccactgattccattgattcttttcgctttcgtaacttttcggttgatttaacttcgatgagcgctaaacaacttgatgctacctacaacctaaatgcgaatttggttgcagatgaaagtatggatgtttcgtatagctatataaaagcattaaaaccagtaggcaagtttagcttttacccgcttgccggagtcggagcatcgattggagaaaatgcccttgaagatgacgctagtcgagacagtggttactccataatgggagcctatggcttaattggcatgtacgcaaaagtgactataactgacaaaatatggcttaattacaatcctttttggctaaccaccattggtggaagtgataattataaagaccattactatggcctaaatcaaagccatattttaactcatgagtttgctgcaagttatcagattaacccgcgtatgaatctacgctatttcgctaactggaatagaaacgttgactttatggatggcgatcatcgtctagaatttaactatcaactttaacaagacagcaattgatatttaaggtaagggattaagtgaaaaaagtagtagtaataagtgtattgtcagcaagcttactaagtgattattgccttgcctctagctatgatgaatacgcaattaaaccagcagagcaacaattaagtaatcagcaacaaaaaattgatgagcccatttcgtttttgcccatccccacgtttattacagagccagcagtagggcctggtcttggtgtggttggtttattttttcacgataatgaaaagaaagctaaaaaaaagaaagagggctctaccctacctcaaagcatcagtttagttggcctaatgggcactaaaaatggcacaaaagggggtgctgttggccacataacgttttgggacgaagacagaattcgctaccaagggattgttggctgggcgagtattaatctcgatttttatacctttgatgaaataaaactactcacaccactttcgctaaatattgaaggccctgcagtatttcaaaatcttaaattacgttatgacaacagtaacttttttatggttttaagcagatttatcgccaagtggatattagtctagcagaaaatccaattgaaaattacttgctcgagaatggcattatcaaagaacacctttctctagatgtaaatacgtcaggtattggccccttgttagagtacgatagccgagataacccacttaaccctgagcgtggctttaactataaagccgagtacttatatttcgatgaggcaattggcagtaaagttgattacagcagcttaaaattaactgctcttaattactggcgttataccgataagtttaactttgcattacgtatgcaatatgactctgttaataatcgaggtgaaaaacgcttaccagtttatattccgccaagtattagcctgcgcggtgtgtctgctacccgttatcaaggtctggatgtttttgttactgaagcagaagcaagctataaaatcacccataaaataaagcttaatgtgtttactggcatgggctgggctgctgataatttttctgatttatcaaaggcagaaaccattgatacagtcggtgcgggctttcgttatctcatcgatgagcattatggtattaccatagggttagatgtagcacatggcccagaacagaatgctatttacattcaagccggttcgacttggtaataaaaaaacaatacttttattgttattttagcaatcttgttgggctaaatattgaattaatctattacactgctattatcaatagcttaataaacattcagggattgaacggatgcataacaaagtatcaactaaccattatccattcaaagattttaagccacatggtcttgtcgagttttaccaacgagagcacacgcttttaacgacagctacagggccgttcaacgaagaaataattgaagctcattctttcatgcaacaagattatatcaacaaactcaccacggcttatggtcaatggtatgaattggttgaatttgaaaactcatgcatggcaacacctggggctcttgaaaaactaatggtgtattttgttgagcttcgacgcaaaggcattgcgccggctaaaacagccttagtcataaaagaggggcttgaaggtggtagcttgctcaccgatacctactgtaatttatataaacgagcaggtatggtgatgaatgtatttaagtcaaaaacagcggctctaaattggttagcagaagagcctgttgctgaattagcttaaaaagtggtgctcttcttcgcgcaaggttagcactttcccccccctcaggagtctagcaaacgctttgctaaagatactgcttaattacaactcagctatcattttaacaagcgcttgtgttgtccattcaagttcgttgaatttaatatcaggttgatagtaaaagcctttttcgcgaggcctatttacatatactttaataggcaaaatgactttagcaaagcctgaaggtagggtttcgagcctcacctccatgtaggtagaatctgtactacttggtgcgccaactaattgtgtgtttgcaaacagcttaaaactatccagcgcatctaaacaagcactggcacattgcccaggcacaatcacataaacaggtgtagtaaactgactggcgttttttggcattgcttgttgctctgcggagactatctcgacataaaattgttcacccttttcataagccgcctgcatactttcgtgggttgtctttaaccagtgataccaaggactagccgtatcatagcttgcgactacatcgccaaaatagtcagtattgcctttagaagttcgccaccacacttgggtatttttgtgtagcttatagcggccatatttgaattgttcactgccccaaagtgctgaggctatttgctcactccacatcgatgagccaccttgattatggcgaagatcaagcaccacagctttagcttgcattaacttactatgctgctgttcaatagcgctcaacatcgcttgataatccgcttgctgctgctcattaggtgcatacgttggcatactgatccaagcaatattctctaaaggccaattaagttcaattggcaacttatcgccattgtaggcatttttaagtttttcagtgacatcatcaggcctaacagtccagtttaattttaggctataggtagaaccgtcggctttttcaaatgtacagctttcaagcggcgacaaaaacgggttgccatcatcaattgttagtcgccagccatggttccaccaactaccaggctgctgaacttcgccgtaatagcgaaaaacacgctcaaccagcaaagtattaattgctgtattgtcacaactcactagtttatcgcccttggcaattgcatctaactcactgtaatacacttttaacgcatcaccgcgccatactgttgaaaaccccggccagcttttttgtggctttaattctcttggcaagatatcgatagctcctgcatgaccatcttgtagaacagttctaaaacgtgaaatagccgcagcaaaagcttgtgaactatgcgcttttactgccagctttaagccttcttgctttgctttttcgagctgtttagcaaagcctggattacgtacatcatacataccagggtgattaataaccgataactgataggccgcttcaacatcttttacagcaagttcagaccaattaatctcagagttagttactgaatggctatcttcgccattacataagcccacaccaagtgggctgaggttaagagctgtaaaaataagtgatgagtaaagcgtcaagggtttcataaaaatccattttaaataattattatgtttaaaaaacatcccatttaaacactaaggcattgttgtgacaataaaaagtacaacacatgccaatagattaaaaaaattcatctatcaagtttattttaatcgtttgtcggtttagatggattactctaaagttaactcatcagcaaacgatgctgcgattaatgaggaaaccaatcatgtttaaaccacttttaaaacgacttgctcttagctctttactaacatgttcagcttttgcaatcgctgatcaaagtgactacaaactgatggtaattagcgactcagattcatcgcaagctattgtgcaaggccaatatgaagcagtgttaaataacacagctaaagcgtctgacgtaaacagccaatacgaacttgcatttaatcgttgcgcagcaagtgtgaagtctaaaaacttcagccacgcagaatcactttgtactgaagctatcaagcttcttaatcaaagcgaagtacgcggctacaaacgccgagagcttacttcattcgctttaagtaaccgtggtatcgcacgcatcatgtcaaaaaacgacactgctgcactgtctgatttttatgaagcggtaaaaatgtcgggtaatgatttagttaatcacaacctaaaccgcgctaagcaaaacttagctttataaccgaattgttgtcacaaaaagtctagtttgtgtgttctctgggcttttttatacaccgagtcattgcacatgcggtgactcatccaaattgttgtcaaaagcttagtttgtgtgttctctaagcttttttattccgagtcattgcacacgcggtgactcatccaaattgttgtcaaaagcttagtttgtgtgttctctaagcttttttattccgagtcattgcacacgcggtgactcaaccaaattgttgtcaaaagcttagtttgtgtgttctctaagcttttttattccgagtcactgcacacgcggtgactcatccaaattgttgtcaaaagcttagtttgtgtgttctctaagcttttttattccgagtcattgcacacgcggtgactcaaccaaattgttgtcaaaagcttagtttgtgtgttctctaagcttttttattccgagttactgcacatgcggtgactcaaccaaattgttgtcgaaaagcctggcttgtgtgttcgccgggcttttttatgcctgttataaaataaaaacgccactagatgtggcgtttgggtagtttcgacaacaataagaaattgcttttaaaagaagcccagtgggttttcgctataacttactaataagtttttggtttgttggtaatgatcaagggctagtttatgtgtttctcgaccaatgcctgactttttataaccaccaaacgcagcatgcgctggatacatatgatagcagttggtccaaacacggcccgcttcaatcttacgaccaaagtgataagcacggttcatgtttcgactccacacacccgcacctaagccgaactctgagctattagcaagcgctaacgcttcatcttcatctttaaaagtcgacattgaaataacagggccaaaaatctcttcttggaacacacgcatgtcattggtgccttttaacagtgttggttgaatatagtaaccgccgttaaactcatctgacagttgctcgacttcaccaccagcaaggacttctgccccttcctttttaccgatttcgatgtagcttaggatcttatcaaactgagcttgtgatgcttgagcacctaccatggtttcagtatcaagtgggttaccccgtttaatttgtaaagtgcgggcaagtacacgctcaataaattgctcgtaaatgtcttcttgaataaataaacgcgacggacacgtacaaacttcgccttggttaaagtacgcaagtacagctccttcaacagccttactcaaaaactcatcgtctttttccattacatcattaaagaaaatatttggcgatttaccacctaactcaaccgtcgaaggaataatattatcagctgcacattttaagatatgcgaccctacgggtgttgaacctgtaaaggcaatcttcgcaattcgagtactggttgccaaagcctcgcctgcttctttaccatagccattcactacatttaatacacctgctggtaataaatcaccgattacttcaagcagtactaaaattgatgcaggcgtttgttcagctggttttaaaataacacagttacccgcagcaagagctggagcaagcttccacgcagccattaacagtggaaaattccaaggaataatttgccctactacacctaatggctcatgaaaatgataggcaacggtagtttcgtctatctcaccgattgaaccttcttgcgcgcgcacacagcctgcgaaatagcgaaaatgatcagccgcgagtggcacatctgccgcaagtgtttcacgaattgctttaccgttatcccaagtttctgcaaccgcgagcatttctagattttgttcaatgcggtcggcaatttttaataagatattgcttcgctcagtgactgacgttgttccccatgctgcttttgcatcgtgtgctttatcaagtgccagttcgatatcttcttttgatgagcgaggtactttacaaaacactttaccgtttactgggctaatgttttcaaagtattcaccctttacaggggcaacccactggccgccaatataattctcgtactgcgctttaaagttaacttttgcgccttcactacctgggtttgcataaatcataatgtgttctctcttcaaattgttgtgtttcatttagcattgactaaattatgcggtaggttattgtttaatgaaccgctagcatttgaagttagctcagttactgaaaacacacttgattcctagtccagactttttgactatttgtccagaatttagggcaacagcgaggcaacaatgaacacatcagttagcaacagaagtttagataaaaaacgacaacgtattgatgtgcttattgaaaataaagttagttttgctggcgaacatgccgagttaagtatttacgacacctatttagatgcgcaaaaagtagccttacattccactgagttactattttgtggcatgatcagcggcaaaaaaatcatgcatgttgccgacagtgattatcatgaagaatttttgccaaaccagtcatttgtgcttgctccagagcaaggagtgttaatcgatttccctaatgcgtctcttaatcaaccaacaacctgtttagcgattgaaatcagtaccgataagataagccaagtagttgatgctcttaactttaatcaacaaattacacaggatgactttttccaatatcaagcaaagctagttcatgcccagcataaccagcaaactcaacaactacttgaacggatgatcaccctgtttagtgaaaatgagcaacaccgggattacttaattgatttatcactcaatgaactcataacccgcctgttacagcagcaaagccgagatttaatgatagcaagctgtaaacaaggcaagcttgcaaccccgctaagccatgtaattagttatattgaacagcaccttgctgagaatattgatattgatgtgttatgtaagatagcgtgtatgagccgcagtaagttttatcaacaatttaagctagcgtttggtgttacgccagctctttggcaacagcaattacgcttacaaaaagcgtataaactacttcaaaaaggtgaagcgattagccaagtttgttatcagttaggctttaataacccaagccattttagtcgtgtgtttaaacaagcctttggcgcaacccccaaaagtatcgctaatcattaatttttgggtttcgatgagaataaacccgataggtaaatgccaacaatacacaaatggcgcttggcacataaagcgctgcaaagcttaatttagcaaataaccatgccccagctaagccaccaaagataaagcctaaaatgattaggccaaacagtttagccttacgttgatcaagcgcctcgccgcggaaaactcgaccaaacataatacctaaatcggtaaagataccagttacatgggtagtgcgaacaattgcgccgctgtaagttgttgccaatgcattttgtaacccacatgccgcagaggctaaaaagtgcccgtagccagagccattgcacagtaaccaaagtgcaccgagtaaaaaccctgcctcaataaatagtgcggtgtcgtaatgacgccctaacttaagtgctgaactgtgcaataaaaacccagcaataccagacccaactaaaaatgacagtaatacgcctaataaatgtaaagcatcaaggctattgccatgcataagatctgctccaagcagggttgctgttcccgataaatgcgataccgcttgatgctcaaagctaagtaaaccaaccgcattcacgcatccggcaaccaatgccaaaataaatgcgcctacttcaacccattttggtaacttagaaatcactcgctctttaccttttttatgacctgttctctcattcttttatggtacgcctatttttatgactaaaaacactttttttcgactctttatatggtaatttacaggtaagtaaatcgattaagtgacgataatgcccaagccaaaaaattggacgctaaaaagtattgcccaagagttaggcgtttcaaatgccaccgtatcaaatgcgtttaaccgccctgatcaactatcaaaatctcgccgcgaggagattttggctgcctgtaaaaaactcggctattttggccctaacaaagcggcgcaatcgctgcgcagagggacctttaatattgttgccttggtgttgccagacagtgttgaatacatggtatcagatccggttgcaagcagctttatgcggggcgtatcggctgtactcgaaaaaaatggcattaaccttttattattttctggtaatagcaataacctaaatagcgtagtcgattttgtagatggctttatctgttatggccgccctcgtaataagcaacttgttgaacaattgaaacaagtaccaaaacatgtggtgacggttgattttaatatcggtcgcgatgcctcggtaaacgttaataaccaacaagccagttttgatattgctaaacacgcactccaaaaaaatgatgatcgggtggcaattttagggctgcgcttacttgataacgacgtactatgccgagtttacgagcatcacgagtttgaagctggtcagtctatcgctcatcagcgactacgcggttatcaccaagcaatcagtgatgctggcatcacccttggtgatgatagaacatggaatattccagaaagtagtgagcgttttgctagtattgccgccaaagaagcgcttagcagtacaccaagaccaaacgttttgttgtgtatgagtgatttaatcgcccttgctgcaatgcgtgaagcattaaaaatgggcttatcgattccagaagatgtcagaattgttggttttgatggcatcgatgaaggacaacgatttgtgccaaagcttacgactattcaccaaaacagcgaagaaaaaggccgcttagcagcgaccttatttttatcgaaagagcagcaaacagccgaaatcgactatcaactgcaattggggcaaagtagttaagctaaaaagtcagccaaatcaactatgctttgttcgctgtcgcggtgatcgacaatgaacacttcacggctagtaaagttgacttttaactcaattgagctggtatcatcatgccagcttaaacgacacacactgccttcaccgttcactgtgaattcaccgttaaaagctgggtgctcatttcgcaattgaataagtttaatcaatcctttaaccacaggttttgctagagcagcttcaatatcttgtgcatttagataaggacgattgatatcacggccaacatttgtacgtgccagtaattccatatcgttttcacaagcgaacagaccgccataataaacttgtggaatacctggcgcgaagaattgaatcgcacgcgctaatagataatcaaagtcatctgcacccagggcattataatacgtacaatttacttgatataaatcaacgttactggctgcagcccctgttgcaaggcgactttgcccatcacttttttcatgaatggtttcaaccaagttatcaatttgctcggcgtttagtaagcctggtttatcacccattggacctgcgtcaataatgccaatgccatcatgagtatcaagcactgttaaacagttacgcggtgaaattgttagccaattcaccaatgcttgcgcatcattgctaaataaactgtgcaaaataagcggtggaagtgcaaagtcatataccatatttacacgttttgcgactgctacctgagtttgataatggctatgaatttcggcaatagtctccataccagcatcatttgcctgtgctgaaagcttatttaaatactcaaacgtttcgtccagcataaaacagttagtgccagcttctttgatagcataaccagcggcgtctaaacgaatgatattgacattattatcagcaaatttgccaagtacagtgtttaagtactcaatgcctgctgttgatttcacattaatatcaatttggttatcggtaaatgtggtccaaaaatcataggtttggccatctccacatttaattggtgtaaagcaactacctggacgcggacgataaatcgctttttgctcagcctccgacatgccatttgggaatacatcgtctttggttagaaataaatcccaaaattcagattgtttgccttttgctagcacgtctttaaattgaaacgactgtgctgaaacatggttaacaatcaagtcagccatcaaatcatagtttgcaccaagcactttgatgtcttcccagctaccaagacgcgagtctacttcactatgatcaataggatcaaagccagcatcactgccatcaatcggattataaaatggcaataaatgtacacctgcaaacacattgttaagtgggccatttaataaattacttaattcatcaataccttgaccggtaatacggtctgcgtaggtgattaattgcactttattgttgatcataattgttaataccaagttgaaacttaatcgattaagatatatctttaaccacgacagcaaattattcaagcagtttttacaacttttatacactaagatacatagtaaaggtgtaagccttcacatgaggatacaacaatgaatagaacacacgatcctttgcaaatgattagatggttgacatacatgatgttttttatgtttgccatgacctctgatgcggttggtatgatcattcctgagttaataaaagaatttgacctcagcatgacacaagctagtgcattccattatgccccaatggcactgattgcttttagtggcctatttttaggatttcttgccgacagttttggccgtaaacaaacgataatgttgggcctgggtttatttacgattagttgttttttattcgcgataagcagcagctttagcatatttgtagtgctacttagctgtattggccttgctattggtttattcaaaacaggtgctttagcattgttaggcgatatctctaaaaacaatttagagcacacaaaaaccatgaatttagtcgaaggcttttttggtatcggtgctatcgtaggccctgctttagtgagctttttaattacgcaaaaagttagctggacttacctatatgttattgcaggggttttatgcttaattttaaccattatagcttggcgtgctgattaccctaaaccgaaaaagcaagaagaacacgcaaaacctgcctcccttgccactactatgagcatgatgaaaaacccttacgcacttggtttttctttagcgattgccctttatgtagcaaccgaagtggctatttatgtgtggatgcctactctacttggcgattacactggcccatggcaattactggcaacctacgcattgaccttattttttattttacgcgctgcgggacgtttcttagcggtatggctgttaaatcacttaacctggcaagcggcgatgctgtatttaagcttagggatcgcactatgttatttaggcttaatatttggtggtgttgattgggcaatattcttattacccttatcaggtctgtttatgtcaatgatttacccaactttaaactctaaaggtatttcttgctttgccgttcagcagcacggtgcggtagctggggtcatcctgtttttcactgcattatctgcagctgcagccccactacttatgggtatgatcagtgatttctttggccacattcgttatgggttttatctcgcaacaggtttcgcatgtttactgtttttagccatgctatataactacttacgcaaccctgctgagcaagctttagcgcagcacagtgcattaagccactaaataaaaatcgttaaaaatcaattatcgaacataaattgtgcaagtttttcgctaaaaagacttgcactgtgtaaaattattgttatctttacttaatcgattaagatagcaatttagacaacaaaccatctgggattgacacgaggcacattatgacaacacacaaacatgccctttacacattaagcgcgcttgcgctagcagtaagccaaaacttacacgccgaagagcaagcacaaccagcagaggctaaaaaaagcggccttgaaacaatcgttgtaacaggtgtaccgcgccgtacaacgattatggcatcaagttcatcggttagcagtgttacattagcagaaattgaagtatcaacaccacgctctacagcagaagcattcagaacaatcccgggtgttcgttcagaatcaacaggtggtgaaggtaacgcgaatatcgcagtacgtggtttaccggttgcatcgggtggtgctaagttcttgcaactacaagaagatggcttacctgttatgcagtttggtgatattgcctttggtaatgcagatatcttcatgcgtttagattcaacagtacaaagtgttgaatcaatccgtggtggctcagcttcgacagcagcaagtgacgcaccaggcggtatcatcaactttatttcaaaaacgggtgagaacgagtcaggtagcgtatcaaccacggttggccttgattatgactctattcgtactgactttgagtatggtacgtatctaaacgacagtgtgcgctaccacattggtggctttgttcgccaaggtgaaggcccacgtgaaaccggttatacatcaaataaaggtggccaaattaaggcaaacctgactaaagaatttgatgccggttatgttcgtgtttactttaaacaccttgatgataaaagcgtaggttacctacctatgccaatgtactcagatggcgattcaatcccaggctttgattcgcaatcagatacgccgcattcagcacttttcacacaaactctgcgtttaaatggcgataaccaaattagtactggcgatatgaccgacggtatgaatccggttgttacctcagtcggttttgaagcggcatttgatttagaaaacgactggcgtatcgaaaaccgctttagaacatcgtcagtgagcggtaactttatttctcttattccagctgaagttgcatctgcaagctctattgcctctagcattgctggtgatggtgcatcacttgtttatgcaaatggtggctcagcaggcgaagcttacggcgatgacgatttagcaatgcgtattcacacattcgatgtaacgctaaatgacatgggttcaattgttaatgatcttaagttaactaagtcgttctctgatgacactagtgttacttttggttactttgcatcaagccaatcaattgatatgtcttggctttggaactcgtacgttatggagctaaaaggcgacaacgcagcattacttgatgttaccgctgctaatggcgatagctactctgataatggcttgtacgcttatggtactccatactggggtaactgctgtcaacgtaactacgacacagaatacgaaacgcgtgcaccttacattaacttagcaactaagtttggcgatttaagcattgatgcaagtgctcgctatgattcaggcgaagcacgtggcaactacgcaggtgcagttacatctacgattgatatgaacggcgacggtaccatctcaattccagagcaaaatgttgttggtattgataacgcaaatccaagcattgttaactacgactggcactacagctcatactcaattggtgcgaactaccaaattgacccaagtttcgcgacatttgcccgcttaagtaaaggtggccgcgcaaatgcagaccgcttactattcggtaaagtagaagctgacggttcagttgccgaagccgatgcaattgatgaagtaaatcaatatgagttcggtgtgaaaaaacgttttgattcactatcagtatttgcaacagcattctacgcagaaactgaagagcaaaactttgaagcaacatcacaaaaattctttgaccgtgaatatgaagcaaaaggtattgaggttgaatcaacgtactacgttggtgattgggacttccgtggaaactttacttggacagatgcagaaattgctaaagatgcgttatcgccagagttagttggtaatacaccacgtcgtcaagctgacctaatctactcattaatggcaacttacaactttgacaaaggtgctgctggcctgagctttattggtacaacagatgcttacgcacaagacagtaacgaccttgagtttgatggctatacacaagtgaatggttttgtaagttacaatttatctgaaaacttaagtctatcgcttaacgtgaacaacctgttcgacaccgtaggtatcaccgaagcagaagaaggctcagtaccagataacgacattatccgtgcccgtactattaacggccgtacaacgtcgcttactttaaaatactctttctattaattaccctcctccctcgttttagcccagtttttactgggctttttacgttttatgtgttcttagtaacagcaacaaaagggctttgtataagactaggttgttgctcttttcttttcacataactaaacagtattaagcagcctaaagctaagcttacagcaagcattgaacctaggcttgcaaatctaaagctgtgaaactgtgcaataactcctgttgcccccgccccacacataacccctaatttaatcgcgttcgtgtaaaacgccgaagtaaacccaatacgctctggtagctgatcttgtaatacggttaaaccaatgcccgcaaaaataccgtaaaacaggccatttaaaacttgcagcgcgattaaatgccatacctgtgtggcaaaaaacacccctaaataaaatacaatggcgcaacaaaatgcgactacaagcatcgaaaccttactgtatcttttagcaagctttgccccatacagcatgataggaatttctaacagtgccacaacacccataaatagcccaggcgtatgctcagcaaatcctagttcagtaatgctatagagcggcagtgccgatgaatacataatattgcccgttgagccaagcataatagctaagcctagcaaccaaaatgataaactcgcagcggctgctggctctgagctatgttgtgactttttagcgctatagtcaggaatgaacttaaatgcaaagataagcgcaaccaatgcacacgctgcagcaaagtaaaacgagcggctaaactcgcctcccgaggctaacaaatagccaagcggcgggccgcccacccaagcaaaagaaatagcggcacgtaaacgcgaattaaaactggtgatgtcgatgttctgttgacgccctgcccattgccttgccacggtcatcatttgcggaattgctgcatttcccatagctagaaataacacgcccgcaagtaacacttgccaaaatgcagtggcattagcaaaggtcactaacgcacacaccatacctgatacagccaccataaataacttacgtgcactagttcctttatcagccataccacccagccattgactaataattaaccccgtaatagttactgctaccatataaacacccaaataaacgggtggtgtctgcagcccttctataatgaataagctcatcaaagggttaacgaatgcccccattaatcccgttagcatgcttagaagaataaaaattacaccatgctgtttaagcaatgctttcaccaacaaccccacatcaaaacgacaatttaataaacaaattaaagggcgcagattatacacagctttgctgtaattttcattttgtaatacaaataatagagaaggagtttcgcataatgaagctatgcttttaagaagagacaattaactgttaagaacaaacagttacttgccaatagggttatcccttaagctgtactatgactgtaacaacttaagagatacagcttgaactcgcaatatacttacagctgcgagaattgcttgaagtgataaaccaatacctttaaagcgtgctatttagtaatttataaaagcgagatgtcaccccgtttgtccagccaaacccttgttgcacagtatattcaccgccaccggctcgactaactaaatcacaaacgttatatttttctaataagcacttatcttcagtaaaacgcatttcaatcatgctcaaccaatttttcataattgcctgcgcttcactaacataaccataatcaaagagcccttttacagcaaaccactgcagaggagcccagccattagggctatcccattgttgtgaagtactacataaggttgttactaatccacccggttttaaaaactctgacatcagcttttgctttacctgttcggcttgcctagcagacgctgcgccaacaaacaacggcaccgctgttgccaatgaatcaacctcactttgctgatttaaacgaatattaaaatctcgatataccccagcctcactatgccaacaatattggtcaattgcttgcaaacgaagagcggctaattcttctatggaatgacatttttgatccttacccagcagtcgataaaagtctccaagtgttctttcaaggttataaagcaaacagtttaggtcaactgggacgatattggtggtttcaatcgtttttaaatcatgatgatctacaagccagcgactactgaagtcccatcctgactcgcatgccgctcgtatatgttgaaaataacttaacttttgtacctcatcgagaccttcagcatcgtgtaaatcttcttttaatgattcaggtcgaggagttgtagagctatcccaataacggtttaaaattgcgccatcaggcattcttacaactcgctttattaaaggtgtttgcgttgataattcgctacaatcttgcatccaaaattgatactcagactctaaagcttcaatagcacttgcaagccaagttaaatcatcctgatgctgatatttagctttccaaagcatagtaagcatgagtgctaatacaggtggttgtgagcgactactgtaatagattcgattaccatttggtatgcaaccattgcgattttgcaggtcaataaagttgtttaccattgcttctattgttgcaagatcaccaatatcctcaaggcctaatgcggtaaaataactgtcccaataatatatttcctgaaatcgtccaccaggcacaatatagtcataaaacagcggtaacaatgagcttgataagtctgtatctgcactgcggtgtaagtgaggccataaatcagcaatatattgttgtactgaagaagtatctatcttagctgttgggattgtttggtcggcaaacataaaatgagtcattacaaactcacgaagctcctcgcctctcaaaggcccaacgagcaaatataattcacaagcactttgccaagacaaattaggaatggcatcagcaaacatcttagaatcagcaaacacctcttctaactgcacatctttaaataattgactatcaagaaagctcataaataccctttattgttcagctgaagttgtatgagaaagaggttttaacgtgtgtttcttgaacactgaaacactcaccaataacaatgcaataggcaccaaagttaaataaaaggcatgttggccactaaatttatcaaataccaaccctgtaataattgagccagtagtccctccaagagcagaaaaaacaactatcagtcctgtcattgctgcgtgctgatacttagccaatgaactcaacataactgagttaagtaccggataaatcggtgccataaaaaagccaatcaggggtaacatgaatgcagcaagtggtacatcaaatattgtttttacttggctaccatcaacgttgtgcgtcataggtaatacaagtaaaaccagcacagccatagatattaagcaactgattaatatactaaaccaatttagatagcgcagtaattgaccagcaaccaagcgacctagcgcaagcgccgcagcaaatatacttgctagctgaatacttacatcaacggggagcattaaaacttgattattaaaagtaggtaaccaagtacctactccctgttcgattaatacataaagaaaggcactgataataaaaattaacaccaacggtttatacgcaagccttagcatgtcaataaacgcgtgaatttgtgagtaatgcgagccctttaattcaggtgatttaattggtgctgtaaaaacagctaaaaaggctacggcaacaatcaaggcaagcaaataatatacatttaaccagtgagtgctctgcacatcatttggatcgataaataaagcaaagatccaatagcctgctaacacacctagcataaacaccccttcaatggtgtttagcaacgctgagtgcttattagcactgtctgttacctggccaatcactgaataaacagaaattttcatcactgcaaagctacaaccaattgctgcaaacagtgcctttagtacccagaactgtgcaattgttggtacaactaaacacataacagcgacaaaaactaaggcagccaacatcgcgattttataaccaaccctaggaataaacgacgcaactaagaatgaaacaattgctatgcttaagtctttaaaaccctctaaaacagatgcgtctgttttagtcacacctaaactatttattgcttgcaaaataacagtaccgacactgtttagcataatagcaaatacaaaatagctgcacgccaatgcgactgttattctgatcggattcattcactcaaacctaagattatttttatttagtctagtttagcaatcaagtaaatgcaaacgtttgcaaacgcatttaaacaaatatttaacaacagctcaaatcaacgctgactggattgtctacaaattaattcaatatcaacaacttgagaggtggttgtttgccccgaaaactgcgctattaatttttccacaagaataactgaggcacgctgcgtattctgtttaatgcttgataaggaaggatggctgatatctgccattgcgatatcgtcaaaaccgactaaagcgacatcatttggaatactaatataacgctcttttaacgctttcatagcgccaagtgccaccatatcgctacatgccataataccgtcaaaatataggcctttttcaaccaagagtttatttatacttttgtaagaagcgccgcttgtaatatcaatagaaaccacatgaggtgtggctttcgcactcgctatcgcatctaaataacctcggtggcgctcacctatttcggcatgcccaggatcacctaagaacaaaatattcttggctcctttattcaataaatgctcagtagcaagcctaccacctaaataattatcgctccctacaatagggtaattgctgggcgatttaggatctccccaaaccactaggggcacaccagcatctgctgcagcttcgatatttgcttgattcttaccctgcccaactactataagaccgtcagcacgacgactatttatgaagtagttggcccaatcgtcgctcgccataaatgagtttgaaagcagcaattctaagccaaatttattcaatgcaagattaatttcgccaacaactttaagtagaaaagggtcatttatagactgctcggtgtccccatctaggttaattatcacggcaacaacattggttttttgtgttcgtaaacgacttgcagcagtgtttaaactaaaattatgctgtttggctaagcgttgaagctttacccttgtttcctttttaatcaatgggttatcattcagggcgcgagacacagttgatgtcgaaacccctgctaatttagccagatcagcgagcttcaattttttttcattcataatgctaaaacactgggtgctgtccttagaatatgtgccagcaatataacatcattttaactaaaccgctgcgtttcagcagataatattttttcagtagcacgcatttcatactctaatcctgtgttcaaatttacaacaaaaagttataaaaaccatttgcaaacgtttgcattgatctttatggtttaaaaaagcaaggtattaacaattgcaaaaatcgtttcaataacttgctttacacacaaaaggaaatgggaacacacaatgatgacaacaacatatactcgcagtgcattagcctctgcaatcctgctagcaatcagtggccaaactgcaatggccgaagaacagccacaaaaatcagcaaatgaaaaagtagaacgaattgtcgtatcgggcacacctgccggtatcggtgttcgtaaaatcgacgctggttacgccgtgacaaacattgatgccgatcaaattgttaaactatcgccaaaaagtacagctgacttgtttaaagccgtaccaggtgtgtgggtagaaagttcaggtggtgaatctggcgcaaacgtgtttgtgcgtggttttcccggtggtggcgatgcgccatttttaacattgagtcttgaaggctcaccaatttaccctgcacctactttatcatttttagaaaactcgtcgttattccgtttagatgaaaccattgaaacaatggaagcactgcgtggtggtccaaaccctgttgtatcaaacggccagcctggtttaacaacgaatttccgtttaaagcgtggtggtgaatacactgaaggtgttttcaaatacacgacctcagattatgacttgcagcgacttgatgctgtggtaagtggtgaggtttctgatgatctatactttatggtgggtggttatgttaaaagctcaccaggtattcgtgatgctggtttcacatcagaaaaaggcagccagttcacaattaatatcacaaaagagttagaaaacggcaccattaatttatacacccgtcaaacagatgaccacggtgcttggtacttaccaacaccactgaatgttgacggtattgatgctgagtacacgcaactaggtactttaaatcgccaagcaactatttacacaggcccaaataatgacgaacgacaaatcgacttaggtgaaggccgtggttggaaaggtcatgtttctggcggtagtatcaaacttgaatttgataacggctggagctttacagatcgctttaacttcaccaagggtgatgctaacacatacggcttagtaccggcaggctctgcaacaacgattgaaacagctgctgaaaccggtgaaacgataacaggtccagtaacaggtgcagtaactggcacagaatacggcgcagacacggcggtgcaaaaagttggccgttgggtggcattaaaagagatcagcgcattcaccaatgatttagcgtttgctaaaaagcttgataatctatcgctggcatttggttattacacagcaagcacatcagcaaatgactggtggagcttaggcaatgtagcgtatcacgtgcttgaagcaggtggcgaaatgctagacggtttcgaatgtaatgcaagtgttgatggttgtggctttaactacgatatcaattcaacaggtgatgcacgcaccaatgcgttttacacaacagctcaatataaattcaacgatgactttacgcttgatgcaggtattcgttttgaaaaccatgaagtggaatactcagttgatgaaggtcttgacggtgtgatcactaagtctgttcaatatgacgaaagcaaaacatcgtggacaacaggtattaactactcaatttccgatgacatgggcgtatttgctcgtgtaaaccgtggttacaaaatgccttacttcgacgacttccgtgataactatggtgcttaccaaaatggcgaaaagctaattaaagaagtaacacaagctgagtttggttataaattattaacagacagcaccgacttttacgcaacattcttcactaacgaagtaaaaggtgacacatttaatcgtcgaccaggtgacccatctgaaattttaaccaacgaagcatacggtattgagcttgattataactacaaccatgaatctggtttctcagttaacttaaactcaacgcttcaagaaactgaaataacagaaagcccaactaacgaaggaaacgaaagtcagcgtcagccaaaatggcaagtacgtttaacaccaagctatgactttgaagttagtgacatgtatgcaaccttgtacggcacaatctcagcggttgatgaccgctacggaaacaacgaaaactcagttactttagaaggttacgaaaaagtagacataggtttaattgttgaacctatggaaggtattaaagtgcagttagcggttgataacttaactgacgaacaaggcataacagaaggtgaccctcgtaatgctgatgcaccgaatggtcgttacattatgccgcgtactacacgcttaagtattagctacgagttttaataataactccctaatcccttgattttaaaatcaatacccaagccactgagttattaaaacctgtggcttttttcatttattagtaactctagcaaatgctctgcaatagctcgatgcgactcaagggttaaatgtataccttcttgctggcaaggcggagctattgctgtgatatccaggaacagcgtttgctgtttcacacacagttcagaaaaagccttaactagctcattagactttgcagccgcccccgcataaatagattgatatgcgccaacttcataaaccctagcagcgcttagtattataattttgggtaagtctcgatgtagataatatttctttatgtttgagatgagggcttctagtgccttggcaatatcagcaaccgacagtgcaaaacggcgctttaaatcattcgtgccgagctgaataacaatcacatctaaatgataagccgctaggtaaggctctaagtacttaatacccagtttatcgccactgaaaggtgggtcgttcaccagcgtgcgattaggctggccagcttcaataacttggtagccggcacctaatttaatacccagtaaactaggccagcgctcatcggctgcaaagcgcttaccatcgacgggcgaaataccataggtgtttgagtcaccaaaacataagatattcattagaatggattcagagtgtaaccttgttgctgcaactgtgcatgcgccgtcattgccgacagcgccatttgcacaccaggaataagctgttgcagctttaccttcatgtgcgttgcagactgcccacacacatacacaacggtattatgtgccaacaattgtgagatcaattgctgatttttattgtcactatcaaagcgctgtttataaaaactgttttccagtacatcaacacttgcgccaccatgcacaactaaagcaagttgaatgttctcaggcttcacaccatgggctatatgcatattaatgaaccgtgctaatgagttcattttattattctgcgcccctttttctgccgcatcagcgacatcaaatgccactttgaacaccgtttgatcagagattggcgcatgatttggcacatcataataaaaaccaaaacctttgatagcaggctcagcttgctctgcataactaaacgaagataataaggctaaagataaacctaatagtgttgatttcatgaaagttcctgttgttttttactttagcctaccttgtttagacgcgtttaactagcatcaatatgttgatgcgctttaaaggtcattcctaagtaattgaaggtgtttttaaacatctcgataaacgcgttaggtgcgtgtgcagaacctgcatttgacagcaatgaaaactgcttttcacgcagtgttctcagtttttgccttagcgtttcatcatccatataatcagtgatccggtctaaaaatgctttaaactgcggtgtggtgttataccaatatactggtgatgcaagcacccaatgttgataatttaacagcgcttcaaataccgcataaaagtcatcatttttatattgcttgtcatagcaataaggcgagataacatagtcatctaggcataccacatcgccaccatattgcgttttataatcattaacttgcaaactcgtattaccctgttttcgcgcacttgaataaataattaccgtatttgttgttggtttttgttgcattactatcactcctttttttatgatgtgcgcagcgtaaaacctcaagctaactttaggtcaataccttggagcaaattatggcagataaaaaacttattgatgcaaacctatctgttggctttgtcgcaaaacgcagtggcgtaaaagtttcaaccttgcatttttatgagtcgaaggggcttattcgcagctggcgaaataatggtaatcagcgccgctataaacccgatgtattgcgccgaattgctgtaattaaagctgcacaaactatgggcataacccttgaaaacattaaacaaacattaagcaccctacctgatcagcgtacacccactaaacaagattgggcagctctttcaaatgtatggcaaactcaactagatgaacgaattcaatacatgcagcgtttacgcgagcgcgttaacggttgtattggctgcggctgtttatcaatggcaaaatgccctatctacaacaaagacgactatttaggtgaagagcacagcggcgctgtgcttttagaaagagattaaagtttataaattaaacagctgtgaaatactaagtaaaaataataaaaggaatttaataatggatataggaaataaaaataccccaaagataaccaccgcatttaaaaccgttgataataaagagctaaaaagtattggcttttggctaaaccaattattcctcgttttttcaactatttttggggtttatcttgcagcccaaagtggtttagagcaagctttaaaattcgactcattcagtaaaatggaagataattattatcttagaacctctctatatgatgaagttaaagataatgctgaacatctcaaaaaatttgctaacttactagcaaaaagcccgcctaagtccgaacttgaatataacaagccaacaatcgaaaagtatatttggcagaccatgcaatattcccccacaactttagaaacgcctagtgagttcttaactgaaattcgtcgtttttataacaaaagtcaatttataattgatgcagcaatcagtagaaaaatgtcggctaaacatgcttcagagctgttaaatgaagaggtcgatatcataaataacaagacgctaccaaacttaaaaagcagtgcattaaagctacaaaatgagctgaataagaatggaatacaaataagctcattaaaagaaaactaaaaataacaaagtgggcatgctattcagcatgcccactttgttattaatctaagccatttaagccgtcttttgcggcgcgataaagagcaccaagagtcgagtcaaaagcccacttaataacactgtatgttagttctacggctttgctaacaactttgccagcaaagaccaacatatgaccaatgaggcctagtgtttgtgcagcaaatgatgctgatgctttcgctattttatctaaagttcgagcaagcatgtcgtaaaatgtcaggcctgttccaatcgctgcttgtgctgcaacagcactgtaataaccagcgtcttttaataaggtaacaagcgccgcacctaatttatctgcccaatgtgaattgaatgatgcttgattacgatcttcaaaatttaaacgcacaggtgtatttagataatgattcgcacgaatagtcaggttaccccaatcattactatttgcggtattgatgtagccaggtgtaccactgagtttgtgggcagcaccttttaaaccttgcccgctgtctaaacgaatttcttggcccttataaggagcatgagaaaatggccataacggcactttagtgacaggatcggcaccatgagtacaacgataaatcttatcgattctgcctgttgcggctcttgagaagttatctagaccaacacgaggagaaccaaatgtatacagctttacaggtaacgaatattcagctttgatccaatctgccgctaacgttgcaagtgcaccacctaagctatggccaactaaatgtacgcatcctgttattttgtcacgtatatttgctgttacaaactcttgcaggcccggcttcatggtgtaaaacgttttattaaaccccgcatgaaccatactaccgtttgaaccaccacttaaaccgaagtttgcatctgttaaaccatctcttaaagaggctgtgccgcgaattgtgataacagaatcaccttgaaactcattttttccgtgtgcaactaaaccaaagcctgtgcttaagccaaataaatgagagaaaaacccacccgacacaccttgtacagcacttgggttaattgagaaattaaaattatttcgcaaagatgcatgcaatgagtgattaagtaaatttgttgttttaatactttttgctttataagcaagctcagcgagttgcaccgcttgagtaggcgtcaaggtattcatataagttccctttgtatgagtcgttttaggttaaagtttacatgatgtataaatcgcaaaagtatggcttgtatcttcttcgataggaatatcgtatgtttgtggctctttagagatatcgcattttaaatcagcaagtaatcgtttgagggttttactgttttcatgaagtgaaacaagtgtataccacaatactattccctctggcgtgccattctctaaataaatgtgctgtaccaatgagtcattatcgaacatgttagctggcttactggttttaattgttttttctgaaaacgtaaaatagccctgttcatcagttactgtttcgtcgatatattcatcaccgtaagtaagtgaacgcatcactttggtatttgcaacaggttttccatcatcaaataactgcccttttacaggagcagacaaaataaaatcacttttattaaagaaaccaaacatattcgcaaatacctgtgttgtagtgaataaaacaaataacgtagcaattaatatagctaaatgactaatccttgatgaaaacacaccaagcctccttgcaatgcaatttatggcaacaaaaaccttattatgctgatttatacattattaattcacgcagaataaaaacaacaaaacaggtacaaataataactgataaataaacctacttgcaaggttaaaaaatcagacttgagtactaaaaaacactgcatatataattttcacgataatagctaatcctattcccattgataatacatatgcatagaagaaagcaatagcgccgccagagggatcatttactttatcaattgctatacacattgagcagaaaataaaaaatatggctatatttataaacaagccaagaataaaactgccatcaacgagtggagatatacctattaacgcagccgcaagtatcaagaaagtacctgataatgctggctttaactgaaagcgaaactcgagtactttaagtaaaaatgtaaaaaccattaaacctaaatagtaaaatgaaggccaaaatagctgataaaatggctcaactaactgatcagtatcagcaattgttgtctgaacttctggtgagtctgtaaataatgaaattaaccaatatataacgccaaaaataagcagccacgacgtcacaaaacgcaaagttaggatgatatccaatggccttttgccctttgactctaaagttttagcgagtgttaaacctaatagtgtgacgccacttaacatcccaactgcgaaccaaaactgctccatgtaaaaataagcaacactaggcgtgatacccaaaagaccaaagttaaatagcatgacagttgaatcttgcgagtcttcattaagatcaacttcttttgcaaataacgcaaagtaaataaacaatggctgtaacagcagcataaaaatgcacgcattcattaatgacataaaccttccttgttctttgtttacctaaactctgacttttgtagattactgattaattctttgaaaataaggcttaagctttaaaagtcctgactcaagttcaaacttttgaatgtttggattggtggattttaggccattaactaaatgactatggatcatcgtagccatcccctcaaagcccgctggcgcactggctagcaagtcttttaataagggttgaataagaacctgatgttcttcgattaagtccggtttgttataaacatcgttaactagttgagtgagtgtttgttgatgttgttgttccatactgtttctatagcgcatttaatagcgtttatagctccttgctgtgagattaaacttcttgatttataataggtgaataaagcccatgagttttaaattagcgtatatgggcttcatacaatatgaccttgtttaactaattccaatataaggagatacttttactgctgctattactaactgattgagtttctctagcatccaataaagtattttcttcactttggaataggtaatatcaaccaaagtaacgccagacttaccaacaaagttaagtatatggcctagcacccctttacaatcttctgcatatttcgaggacatttttgatatttcaaccaagctacgcgctaaagcatcatatatagtcaaagtaccagcaacgacaccttgcgctaatatgctagttattttgccactctctcgtaagagcgttaatagtgcgctcgtgattttatctgcccagtgagcattaaatgatgcatgatggcgattaacatactttaaacgtgtcatcgtcaaattagataatgagcctctttccatacttttatagtctgggtaacgagatgcggtattaatataacctggtgcattccctgccattttgtgagcagcccccgttaaagaaacacaagtactaagcctatactcgctcccagcatgtacaaatggccaaacaggtaccatagggacaggatcactcctgtgtactgcacggtaaataccatttaaatttgtttcagtttgaatcgcaaatgggttgcaaccgactctaggagcaccaaatgtgtataactttaccggcaccttaaattgcgccttaatccaattagctgccaatgttgcaattgctccgcctaaactatgaccgacacaatgaactggtctgctacctaatttactgagtatttttgataattgtggtttaatagattcaaaagtacgattaaaacctgcatgtacggctttatagtttggccccaccgtcattccgcaatgtaaatctgttagtgtgtcagcaatgcctgcagtaccacggaaagtaatgacaatttcattttcataaataccaccgtttcttccttcaccaatatacccaaagccactactatgatttaaaacatgctccaaacaggttccagtaaccccttttagtgatgacttactgttaaaaagaaactgctttgccagaactataggtacatctaacttacctgtaagactttcataagcaaattcggcaaggttaactgccaatgttgggctcaacgttttcatattcatccttaaatagaaaagttaactactaaaaaattgtgttccatcatcctcaagttcaaaaacttcaaaatcattttcccacctgcaaatacttaacccatcgaattccaaactcgggtttttcttattgggaaaagtgaatcgcacttcttgtgaacttaaatctccattcagggtaagtaatttttcttctatctctttgaatggttcaataccaagttgttttgtgttccataaaacatacgcttcttcattacttaaaattgtaatgcgttgtaatacaacatcgtgaacaaacatatcaccaggcttttttgacgttattaaaatttcaggcattgaaaaatagccattagcatctgttaccgtttcatcaatttcaacaactgagtgagcataagttaactcacgacgtatccttgctccatttaccggctctccattattcaaaatacaacccttgacctcagagcacatatgaatgtcgtatttttttatcaacccaaacatacacttaaacctccctttaatttatgactgaaagaatttgttaccttctcggtattataagtttttagctaagatgctttatccctgaaaattatatggtattactttcgattctgatttctattgcggaacacttcttgctcaattgctgaacgagcctcttttatatccttaaaaaaatcaaactgatattgaactaagttttggtatttttcacttttaactatataaaacgcgagtaacatcaatacgatattgatagcagaagctattttataggtagctccatcaattaatataaaagcaggcatacaaataagtgctaaaaataacgcgtaatactttaaaatttttgcacacgtataagagccgtggctcactttaaagtttattagacaaaacgctgtaccaacagaaaacaaaataccgataatccattcaggctcggcactaaaatattgcgttaagaaagtcattccagaaaaaacagttcccaaaagtaaaagcacggtaacaaataaaaatgaccgcaataattcccaaggtggaaatatcgacactctatagttttttgacactatttactaaactcctcataaattccaacagcaagagagtttacaccccctgataatgcacttccgctaaagctaatagatgcacctacagcatctttgatttgcagctttaaagcttgtgtaatctgtagtccactataccttttaggaaattgccctgttctgaccattcttttcaaaatattattagacactccaggatgattcatcctaattatatcctgcgttaaacgcttcctttcactacgagtaagcccttttagtaatacatctgtactcttgtttgtatttgcttttaataatttcacagcttttaatgttgcagcccccgcagctgctgcacctgctaatgaaatcacatctaacgccatggttacattttgataccattctttagagtcgtacaaatcatttaactctggatttacgctttcgttataagttcgtacccctccgttaatacattgaagtgagcttgccgtacttgctgctacagccaaataagtaactgctgaacttgtccctccagagagtggaattgcagcagcacttccaaatacaacgatccatcctaacactgcagcgctacagcttaagactgtgccagcaatttcaccgactaaacgagattctcgtacattgttttgactatttttaagatggcctgcaaactcagcctgattcatatttctaggctgttcacgaagtactaccttggtgggggctaaagacgtgccactataaggtcttaactctacgacagtaaaacttgaatctatatatacaaccccggcacctgccaagccaggtatcttatcgatacttttaaaaagccgctcttgatccatttcaaaactaaggcgtgctcttaaccccctttctttgtatcgatgatagccactattgaacattattgaatcctttcttttcatttaacttctattaattcacccaaatcattctacaaattttatttgaagtatattcaagccttctgctctaatgggtatagtatggtattaatttactaaagtatcccaagctttcattttatggttaattctgaaccaaatggtactttaagagtttctcgtacatatacatctttagtcacaggagtaattccagataacaaaaagaaagtatttaaatctaaataaacggtcaactctccttcaacagtctcaaatgggttgttatataaatcgcccgaatttttaaagcccaatatatcaaagcaaccttcgatatcatttaaatctaagtttaagtttcgtagaaacccaaagtgttcatcaccatcatcacttgagggtagatgaaataagaaaaccccttgttttggtacattatatttctcaatacagtccttacataaccatgagcaagtataatagtcatcagtaattcctataacgtaaggtactggctcaatttccatccttctatcagccttcttttttaaatgccgacacacttttataggcttgttaaaggggtcaggagcattgtcatagcgactcatttaattttcctgcttttagattcaatattctagaattcagtttatagattattaatttttaacccaattgcattccatatgctaataccaaactgcgctgaaaattaaccaaacaagcataaatattaacactggagcaaccttgaaaatgacttgtggcagataagtagattgattccaagtaactagaaccctatcctttttaggtaattctgacaccacccttagataagcaaccatatacactacagaagcgattagccaaagtaatataccggcacttttggctaactcagcagcgtataacgaaatagggaaaggtataagaaatacggcaacatatatgagcgcataaagttcaactttacacttttgttcatcattaaaaaacaaatcattcccctgcataagttaacactcttaaaatagtgaattttatcactattttagccacatgcctttcatcacctcacggcaagccaaaaaaacaagccaataactcccctctcaaaaataagcgaattaaaataaattttaaatatgcgaccttacatattatttacaaaacacaaagacaataaaaataaattaaaatacttttcagctttctctataatattccacacactttttgattccaattaacttactcaatacaaaaataccaaaatgcaatcaataattagtaaaaaagttcaggaatatttagcagctatttttttcatctcttctaacaatccaccttttaacatgtaattaggtatatcccacctttgaggtgctatgttagaaatatagcttttcctatttccgttccaaatattcaacccaggtaggttttcagcacaacaatgaatcattgcattaataccaatcgtctctccatcaaactcagccgatatgcttcgctcaaagtttgaaaaccccccttcacttttctttttaaaaaagccattttctattttatcaattatccaaggcaatgcagttaacgggtattcagactgcgtatatcttcttatttttttcattttagaatagaagttagaggacacgattaaataatccccttttttaataagtaagtttctttcatcttgaaacatctcataattaagagccaaaagtactacttcatcactctgcaaatttttatgatcaattagccctaaaggagactttattatatccttcactgtatttatcctttaataggtgttaaatggattgtcgttacatttttcatttctgcaattgtaggggggtcattttccaatgttaatgtttctaccacaccatggtcgtttccggcatgtctgcactgcgtcatcccatcaccagtaaattcactattcgcgccaaactctgtcctaagggcatgccgtgctgcaaatttatcttctttcaccttatcatctagagattctataaactcatcttgatccttcggattaaactcatttaaaccattttcccaatattctctcatatgagcagcatactgcttttgataatcagaatttagaacactacctaaagcatcatggtgttttggttcaagatgtttcctcgctggtttttctaattcactccacgtgggcacaaaggtattttcaccaaaactattcaaatcttcaccgcgatcaactatatgaagcacatactccttagatgggtcacaaccggttgccaataaatctgcaattatctgtgggtcgctgtcagcattctcaagcatatcaaaactagttgcccacattgcgactaaaccatttggtttttggaaggctaattttgcatcagcattattattcactggttgaaaacttactaggaatcgtgacttcccaacagaaccatcttttgattttttcactaactcagcgtcagtatattttgctttgtagccatctttaataatattcttacgagcaatatctaacctttccaagcactcttcgagagattttggttctggatttgaatcgactttttcctcttgaactaacttttcagcagtaccaaggttaatatggttaaccatttcatctgctgtataaggagatgcatcttctgggagttgggatagtttaatgatttttacttttagttcaggtgaaatagctgaattagcatcaagtgctgcttttacttttgcctgtccttctttacataacaacccaaacggatctacccaattaaccggattcggcgcatattggtagtggtttatgccgcctactaagcctatcgggtcttggtttataaagcgttgttgtttggggctgtaatagcggtagcggttgtagtgtaggccgctttcatcatcaaaatattgtccttgaaaacgtattggctgagtgaagctgttttctttattaaagtcagtatcggcttttggttcttcatagccgtacacatcggcgtggttttgccatacaacttctgcattgttgtttgtaacaaaacgtggggtatttagttggtctaggtgatagtagtacagctcaccttgtttaatcagtgcgaccgggtgaaattgattgggtaagttgatgtaccaggtatactcgccgtgctggtattcacctattagctggtcgttatcccaaatataatcaatcttgccatgctcagtctgcttagcaatgcgacgacccagtgggtcgtagtcgtaatgtgttagcgtgccgttgttgttaaagctgcttaattggttgaacgcattgtattcacggtgcgtttttatacctttgcccgtttcgcgtacttggttaccacagtcatcgtattcaaaatcgctatcgccaaaatgggttaacctgtcagcatcgacttggctatgtgtaacagcatcattagcttcttgtttattgactgcttcatcatgctgcacttgagtttggctaatcgggttaccaaagctgtcccactgaaattgcttggctttttctggcgcttgtgtacccgaatttgcaccagctagattttgctgaactaattggccaaggctattgtattcaaactgtgtattttggcagctaatgccttgttcttcacgcgcaatgagttgattaaccgcatcatattgataatcacagctatcaaataatgtgcgctctggatgtgatagttgctgctgcgttaaacgcccaaaaacatcaaacgcctgattaagggtaacctgattaccgaaaccctgagttttgatattattttggctgtcgtagccaagctcaacgagttttgctaactcaccatccgctcgctttacctttatagcacttaactggccaaaaatattgtagttataataaagggttgttgagtctggcaaggtaagagactgtcgtctgccatagtcatcgtagctgtatgcaagtttatgagtttgagactggttgtggatttgctcaacactgagtagccgtccgcctttatcaaacgactgtttaatcgttgattgctcattatgagcacgcgctattttaccctctggcgtataactgtaatggttagcgttattaactatgtgtttatttgtggctagacttgcgtgctgcgaaataacgcggcctagcttatcacgcttaatatttacatggcgtttgtcgctttgcgtgacagccactaaacgattacatgcgtcgtacttaaattgctgctcagtaccatcaaaacccgtgatttgtgttgggttttcatttgcatcgtaattgatacgataaatatggccgtcactacgctcgattgcggttaaatttcgctctttatcatacgttaaatgcagtgcactgccatctggctggatcacgcagtggggctggcttagtccctcaaaatgctgctctgtggtatcaccattaccgttttgcgaactaactaatcgaccagcatcatcataagtaaaaagctgctgttgtttgttatcagggttactttgctcaaacgcggttgtttcaactagttgcccttgctcattatatttatattgagtaagcagaccggcttggttaatggttgcgtttacacgaccgaggttatcgtagctgtaacgaatgagctcatcattatgctgctttgcaagtagctcaccttgttcattccatgtgtattttaatacatgaccatttggcgtgacatgctgggtcaaattaccttgtttgtcgtaactgtaaagtgctattcgcccatctgcttgggtttcactttgtaataaccctgaggcactgtattggcgtttaatcttctcgccatttggcaaaataacaacgacttgttgaccaagttggttatagccaaattgagtgcggttaccatcagcttgggtgactgattcaagttggccgtattcagtataggtataaagcgtttgatagcctagagcatcagtttgcgctactttttgtccaagcgaattgtaatcatagcgtgtgatattaccattggcatcagtgtgctcaatcagcttaccttgctcattgtgaacaaagtgctcttggttgccgcgtgaatctatactggttgttttattgccttgatactcgaactgatagcaataggtattgtcatcaccccactgtttaatacatttggcatcataaccatatgagtcccactcaaagtgatgactaaaaccgcttgctctagttcgctttattagtaaatttgcagcgttatactcataacgctcttgttcagcaaattggtttgttgccaccactaagtttgactgttcatcatactcataactggctaacggctgatctaaaagaactaattttccttgttcattagtacgataagcgtgcaccgttttgagcaaaccgtgcttattatatttcagtacacaaccgcgaactttgtttacttcaatacggtgtaaacgctccatcgaatcataataaaaacgggtgctttgacctttttcattgatgattttttcgagcaaccatgctgatccacccggcataaacgtcaagtgtttatcatctggtgttactaatacttgcttgccattttctttataatgaagcaccaagttactacttaactgataactcgattgccccggcttcactttttcaaacttatgagtcgcaccatgttcgtcgtgatactcaagccagtaggtgccctttttctttgggcccactttcggcggtggtaggtaatgctcggttaattgcactaaataatcgtgtcgccagccatttcccagtattgttttttgattacagtgagacgaacgatacaaccgacgccacgttaaaggcctatttgcggctaatgagaagtcagttaaaggaagaatttcttcgcctgttagcatcgaaaccgggtctgaacggcattcttgttctgttataggcgattcacttgcggttgtgttactggcactgcccttattgctagcaggagcttgtgttgcttttttggcattaccattacttggcacagccgaagatgatgagctgctactctgtgatgagcgagtattatcactgacttgaatggtgctttttacttgctgctggaagcaagtaatagcacctgaggttaaggcttttatcaaagccgatgcagtttcacgcgctgttgcttgccttggacaattaataccagcaacatttaacaattgaataagatctaatcgtttagcagcatcgccacttaataccgcgccaacctctgctacaaatttgtaggcactatccggcgtattcgttgcgacagcaataaatccactgggggctggctgtttagctaacacgaggcagatgggataacgtgttccctgtaacacaactgctttactatccattagttgcacatttccttacttatccataagtatgacgcgacggcttggtacttgttgtactcttgcgaaattattaacgcctgcccaaaacgctcagcataaagtgagctatttgtcaggcttgcgaggtttacaaccccttctattgctcccattttgcctaatttataattaggaagttggaacatcgtttgttcattaatttttttacttaaaacaggtaaataacttacccaatcatcactttctaggccattacctggggcaaatactaaatctattttttgttcatttagcgataaaatacgttcaagctctgcatgtataggctgatgttttgctatatccacagaagaacacatgctcgtagattgcaacgcccagcctacctgagtaaattcaacacatgccttacaagccgctatacctaaatattcaaagccgttatgctttgaggctttaaacacaccatcaattgctaccacatcaaaagcactaaaattttgctctttagctattgcaatcgcactgtgcataccgtttgcgccttcaaaaatcatctgttcgacagcaatgccgtaacgctgctgaaggctatttataaatagtgttttatgatcagtttgaaaaggcagtgccggtaataaccaaattaacggttgctgcacgtctgactctttcaatactgactttgcttttacaatacagtcataaataaaggcatcaaatgaatgccagttttgcacttgctcatgacctgagctcccctctagtactaatacttctggggctacttcataaggtgtatcaaactgctgtattgaaattttaaatgcactcaatgctaactcgcttgactattttgacagtcatatttaagcgcatttaaaattgtaatcacctgccaactaaaaaaatcaacaccttgcaggcttgctacactgacaggcctattcatcgcaaagccataaaccagagtttgatcattaaagttgatcttttgctctggccaactcaatgcaaattggcgctgaaaatcaacagcggcttgcttacaatcgccagcctgaacttgagtatcaaatgcaactaattcatcgagctgactacctaagcagcgtttaataccagcaacaagattcttggccgacctcacttcggtcaacagtgcaacagccatggggacatattttgttgccccagtttgcaatagcaccgcaatagcttgctctcgagtaaactgctggctcacatagttgcaaacaaaattcatcctttgtgggtctagcaataataggtacacagacattaacggtgaattaatcatcgcagccttttcaaatgcgtttactgtttcttgcatttcaggcatatctgggagttgttttacagcacgttttattgctttataaataatcgcctttgtatctgaattaccgtacacatttgcccaattcaaaaagtcgctattggcggacccacttattgttaagcttttctccaaaagcttattttttaaaagcgtaaactcatgtcggtttaataaccccaataacctctgcttttgagagttcgacattaatagcagcgcaaccaagcacgcttcagcaatgtcatctaataacgtttcttgctgctttaacgtctcaatttcttcaataatgcgttgcaccatttcaaactgtacattgctagcaccctgatatgcttgtacttttaaagctaattgctgacgaacttggtcgataaacccaatgctataaaacgcactttgctgcatcacatttaaatttgaaagagctgctttatgctcatttaaaatgagtgataacaccttatccaccaattaaaactgttgggttacctaaaacaattttaccgccatgagaagtactgtctcccattcgagcagcgggttttccgtttattttgactgtacccgaaccgctattaatactatctggcgggcctatacaaacaagcatgtcaccttgtcttgctgcaggcatattgccaatcaacacattagccgaacccactacaattggccctccaacatgaggaactgtacctgttacttttggacaaacatgcatatgccctaacgttgaagcgggttttcccataatgccttccttgtttttggctattcgtttaaaggaataacttgtaacttatttgtgcacacgagttttgctaactcctgcgctatttcgtcgtacgaaagatcatttattattgagcttgtttgtgtagcgtattggtaaatatgcgacaacacattgctactattgagtacagggtgaaggtttataaaaaattgctcagcaaaataaccatctaggcccttaaaataatctattggcaagttcaaaaacggatcatcggggcggttgacacaaagacataccaaatgaggtaagccataacggcaataaacggtaaagccattgcttgctgcaccatgaacgaaacctgattgaaacgtattttgtaattccatgctagttcaactttatcatgccagcagaaagggttattgcacttccatcaaccttcacgttactgcctttaatattgatatttgtgccttctatagaaatattaccgctactactcatagtaatttttgccgaaccggtcttaataacaatttcttttccagcttcaatattaagtgatttacccactttcagcgtgtcattttcaccaatatcaacggtgcgattcacttttacttttgcatcatcgttgttgccaacttcgaggaaacgatcattatcaattttttctttttgatcattttttacatacagctgcttatctttttcagcttgcatgtaaacaagttcactgccttttttatcttcaaaacgaagttcattaaaattatctgctccaccctcttttgttgagcgtgttttgataccgctttgtgttttatctgcaggcaatgcataaggaggcattaaatcagcgttgtatactgcaccgctaatgattggctgatcaggatcgccattaataaagtcgactaacacctcttgccctacacgaggaaagaaaaatgcgccccattttttacctgcccaattttgcgcaaccctgatccagcatgaactttgcgagtcttttttaccttctcggtcccaatcaaactgcactttcacacgcccgtattggtcaaccataatttcatctgcgctgtcgcccgtcactatggctgtttgcacaccatgaataacaggctttcgcatgctgtgcgctgcacgatatggcacatcttttggcacacattcaaagtggttggtaaatacttcttgtgcaccagattgctgagatcctgactgatttggcaccgtaatagaggttaataacgaggtgatagcaaacgttttaccttctaggcgcgggtcttcatgctttttaaagctaaataatttacccaccgagaatgaacggcaatcacttctaccgctacttaacttcatattacgctgtaatgattctagctgtacggctgctaaacctgcagctcttggatgggtttcggcttcggctgtgtattcaaaaatttcagcgactgactgagtcggtaaatctgcttttttgtgatcgccatcagggtatcttggtggttgtttaaaatcatagccaatacgcttgtaactgccaggcgcaatacttaaaccaccttgccatttattaatgtgtgactcactgaggtgaccagaggtaaactcaactttagcttctgcgcactcttcgtaagccgttatatcatctgcgagcactagggtatgtgcactgttactatgctcgaaaaaataaaaaataccttcttgctgaaataagcgttgaataaagtcaaaatctgactcttggtactgaacacagtactcgtactttggatacgttttagttgtattatccttaaaagcgacactatgttgaccaaacaaatcggcaaaaatatcttttattgttttcttttgaaagatccgactgttttttcggtttcgcattgatgctgcgaaaggcacaatagtggcgtggtaatctatataatttttttgttcatcaatatcagcagtgcgactaccattagatactaattgactaactataccatgaaaataacgctcacctgcgctatcggcattttttactttaatagaaacaggttttcccaccagatcttcatgcgctatttgtgtgcctatagtgaacatattcactgacatcacaaacaaatcagacatagactcttgcaccaccagccgagttaagtaaagcgtatctttacctgctggggtgttaatctgaattacattgttatcttgtgttgctttttgcattccatgcttcctattcctaaagatcaaaaaagctctgagcaaaactcagagctattaggtactgcaaaaaattacatttgctgacctttaacaccgctgtaaccataaacaagtggtgcagtgatgttatttttgtcgtcagtaggagtaacagtcatcatcatttctgtgtagctgatagtgattgtttcaactggacggtcattttgaacagatacagagtagctagaaatcattgcatctgtaagttcgattttcatgatttcttcaactttatcaccttgcttagtgatgtggaaaacagccggtaggcctttaccaattgtcgcttctttgaaaaggtctggagacgctttatcttgaagtttagtgatagttacatcacctaagcgagttgagctagattcacggtccattgctgtaccagtgtgtgctgaaatttcacggctaacgttccaatctaatgataaaactgtgattaaatctttaaaagactcagcagtagtttcgcctttaattgaaccgtattttaaatatgtatttgattgcatttgataatgctccttttaatttataaataatatccattacattggatcatttacttttggtttcccaaaattcctttgaaatcattatctctaactgcgcaacgaaaaggtcttcaatatcctttccctagacgaagacaatgtctcaatgttccatcaactaatgaagacggacaaattataatccgactccaaaaaagaaacaagaaactaatttaaatatattaatttatattaacaacaaatgaatcatcatttaaatctaataatatactattgattttactaccagtaacaaggctttcaagtaaagattcagataataacggcaggacattattttgcaataatgcatgaatattccttgcacccgaaccagagtcattacaattgttaactatataatctacaacaaaatctgaatataaaaaatcagatttgtaatttttgttaactctatcttttattttacttaattgaagttttgcaatttccgcaagagtttctttattaagtggcaaataaggaatcacattaatgcgaccaaggaatgcagctttaaatacttccagtaaatcactttgaatagccttttgcagaccctgaacgcttggcgctgtttcttcgtcttcaaataagctcattgttgtatcagtacccacattcgaggtcatgatgataatcgtgtttttgaagtcgatatctctaccttctccatctttaattgtgcctttgtcaaacacttggtaaaagatgtcatgtacgcctgggtgcgctttttcaatttcatctagcaaaataacactgtatggcttacgtctgatcgcctctgttaatacgccaccctcgccatagcctacataaccaggaggtgatccaagtagtaacgatactttatgctcttctttgtattctgacatgttgatgattgtgatgttttcttcactgccatacacttcattcgctaatgcaagtgccgtctccgttttaccaacaccactaggacccgctagcataaaaattccattcggacggctttcgtcagctaattgcgctttagatgtctgtacaacttttgcaattaactccaacgcatgatcttggccaacaacacgctctttcattgtgcttgctaaattaagaacactcttcacatcatcttcatgcatcttgccaacagggataccagtccagtcagaaataacttgcgcaattaactcatcatcaacctgccaatgcaccatgttagaatcatatttggccaagctttctttgcattgttgaagcttttcaatttctgcacttggctgttctgtttcatcattcaggcctgtgatgacttcttttacatctttaataagtgacatttcattttcgaattgcgacttcaatggtgaaagctgctctgtaatttgctggcacttatttgttaaactctcaagcacctcactgtgatttaaccctgtgcgttgctcacgagttaacatattgatttgcgactctatttctgagcgttcattttcaagagtttcgatagaattaggagttgatgcttggctcattgcaacgcgagcgcaggctgtatcaagtaaacccaccgctttatcaggaagttgtctgccggtgatgtagcggtgtgataaatgtactgcgctttctagtgcttgctcggaaatgaacacattatgatgtttttccataacaggcactaaaccacgtaacatcgcaattgctttttctggtgtaggctcttccactttaacgacttggaatcgacgagcgagtgcagcgtctttttcaaagaacttcttatattcagcccatgtagtggctgcaattgttctgagttcgccgcgcgctagcgccggttttaataggtttgcagcatcattttgaccggcttgaccaccactaccgatcattgtgtgtgcttcatcgataaataaaataaccggagttggggtgtttttaatttccgatattaaagactttagcctattttcgaattcacctttcataccggcgccggcctgtaataaagcgagatctagggtgtgaatttttacattttttaaaacatctggaacactgccttgagcaattcttagcgctaatccttcaacaacagcggttttaccaactcctgcctcaccagttagaattgggttgttttgtctacgtcgagtaagaatatcgaccatttgtctaatttcaaaatcacgccccaaaattggatctatttttcctgcttttgcctgggctgttaaatcaactgtaaattgatctaaactaggcgttttagaacttttagataccgatttttcagcttggctctttgccacagagctttgctcctgtgacttagcgaccatttcaggccaagcatgcaataattgccctgcttctatcttattaaactctttactacaacgactcactaaacttgctaaggtgtcatcttttaccagcgtgtaaattaagtaagcactacgaatttgtgtatctgtaaaatcaatgctcgtactaagccacgtttgcttgagcaaactggtaacatgcatcgataagctcggtgatgaattacaacccgttttgtgcatttctaaagacttatttaaatcattttttaacgagtctctatcaatatcgtaagcgctcaaaataactctaaagtcatcaagttgttgctcaagcatcgctagtaaccaatgctctaattcaacagtaaagtggcttcggctattacaaattgcaacagcctgttcaagactctttttgcactctgggcttagtttttctacgagtgtatttagcgtcattgtagacataatatttccttgtatttatttatcctttgaacgaaagttcagagactttgccattttgagctgcgttttcagatagcagaaaactattacagcctaattgacatcgttcttttaataattgctttgcaccaagcttataaaagtttgcttttactatcagtgaatgctggatttgattaccaacaaaatcacccacaatttgatgggctaaattccaaagatcttgctttggtagaagacgggctgtttggtgctcatttttgggctcgataataacttcgatctttgtcgagatatcccagatttgcttacctgctattgcatcaataccaagccttgcatgttggcctgcaaaccctccactatttatgcgtgtttgctcagattgttttagcggctgccactggcctacaaattggtttatgttgacatcacagtctaaatagaaagttaaaatattgcgcaaatctgccatatttcgcgtctttcgactgaaaagaccactgaaataaagctgatgaggggcattccccccactcagaagtgccaaaatttttgtgtggttatcttgattactattagcaaagttaagcgcgggtttatactttttccaagctcggtagtacaacgaaatcaaacgatgattaaacatatcgtagaaatctctcattgtactgtctttatagcgcaatcgttgcatcaccagttcactataaaaatgtggcaatgctcctgaacagccagtcattcccataaatgatacttccatatcaaattgggtaattccttcaacgtttttagcgggctttaaattagtaattgcattacccgcaaagccaaacttttgtgttgaactaaacttaatcagctctagttttggctgacaatcatagccaactttacgatattgctgggccgcactcgacaactgagactcgatcacaaacacggctttgtaaaaatctatttctgtcgcgttctcgagcaattgtgcaatcatagtagcactccggaacctactctagctggccactgatgataaactcgatcttgttcttttaactttagacttaagcgtgtaaagctattaattgatgcaaattgcgagaagaaacaatcaagaactgaagcaaaaaagaacaccccactaccagcgtaatcatcatttgcaaatgtaatttcaatgtcagttcctgctgcaaaagcgactcgaccgttttgcacgacacgcgcagttgcaggttcaattttgacgctatagatgttatctatcatcccttttgattggggtgttgctttaaaatcatatagcctcaatgtttcttttaatttctctgcactttgctcaccactaaatgaatcaagagtcagatgattgatcaattgccagcgagtattactgccaagcacaggtcttaccgcatgagttggtgcaactaaacacctgattttttttattacatcgccacgctttggcaatgtaaaaccaagttcatcatcaccaaaaggtaaactagctggtagattacgattactgcattgagcgcgcgctgttaccaccgtatttccctcactgagagcttgtgcactattttcgaagccaccatttactaatgataaataggtttcggttcccgcctcagcatagccaccagcccaaagtgctgtttctcgtcgagtatgccaatagagatctttatactcttgatatttagggtgtgtttgcgcataaaaaggcgtcactatctgtttattccccttgtggtcaaatgcaaccacctcttcaaggctaataacttcagatatttcagagtcgatatagcgtggtgcgagcttatactcatattcgcttagctctgggcggatcggttcaagttcttgttcatataaatttatgattggcgtgcagcccatcaagaacatgtctttatctacttgcttctccaactcgctagactcaacatctaaataaaaataaagtgttgttgtactggcattgcgagggagtaccgagcgaatattttgtaactcaaagaacttaaacttttcagggaaaataaagttttcgactaatagcctatatgctgatgaagaacgcattgagtaaggaacaacagcttcatgctcctcaaatccaactgattttaaatgagttttcgagaggtaatgcactccctcatcgccattatctactgctattccgatgcaatgtttaaacaatagttcgtatactttgagcgcataatgccattgtccatgaatataaatttttagatcatttagctctgtttcatgtaatgaaacgccatcatactcacctgtcagttgtaacttaaatatcgctttagcaggttcattaaactttggtttaggcgcaataaaaggactgttatcaaactgagcagctgttatctctacgggccacaaattggtatcaaaacagctttgaaatttacactgtttcattccttctacattggtttcaagctcactcccgcgaggaataatgactcctgtcgttgataggttttctgactctaactttacaattgataatgaagggataggcgcttggtagtctggatagagctggcctaaaagcgcatccgttaactcaggaaagctatcatcaagtttttgcctaatgttggcagttaaaaatgcaaatgattcgactaaccttgaaacatgaggatcttctatcacttcgtctgtaagttttaacctgcctgccacttttgggtatttttctgcaaagtctttcccaaggtggcgcacatacgctaattcacgattgtaatattttaataattcatcattcatagtgaagactcatagattttcatacctaaactaactggctcaacttcagagttaaaactgatatattcaggctctggatcggcatataacaaggcattaattcttaggtttaatactcggttaagggggagttcttcatcaactaacacttcaacttcaataaacctaggctcaaatcgtaaaatcgcatctcgaactttttcacataacgctgctcgcccctcatgcgaacttacaaccatgctcgaaaaatcaggcaatccgtatgataaacacgatgttgcaagctcactgtattgacttggccatgtatgccactggatccgagcatttagtaacgcctcgatatctcgtcttacgtaactttttaaaagtgataagctgataccatccgttcgctgtggcgagtcctgtacatctggctcgtcatcaatcaaacgatctaaaattgatgctttgagcggctgtttgcttgcaatcatgaaaatttcactctcaattgatgaaagaaccaagttcagacaataagactgcttcatcatttataaacagcattttcattccgcgtcctaagtacatttcttcacttaattcttgccattcagtcacttggcctagtttttctatttcactctttgagtgtgggtaaacaactgggatgtgagctgtacctacaggcccatctttgatagtaacctcaacacgtagccaaatttgctcaacgattgactctattggttgaacttcaaatttttcgatttcatcaaagcgagctaaataaaactcaccgttggtccccaaaatttccagaaatgggtttaatgaatcatcaatatctctgattgcagtaagttgctcatttgctgaattagttctgaaagactcaactttggctgctttttctgtcgcttcttttaaatcttcttcacgtaaagcaatatgcatctgtagaaatatctcatcgagttcatctgcttcatgaaatagctttggagccgctttaccttcataaaaatcttgtcgtgcttgctcggccctgattaagtgtcttaaattaacagcaccaactgctaactcaggtgatttagtcaccataaaatctaattgtttatccgctttttcaagttcaccattaacacacaacaattccgtataagcgctgcggatatcaaaattcagtggatcatcttttagtttttgtgcgcagtactctaatgcatctgctaattttccattgcggatacactcatggatctttttcatttttattcctttatttgatgatgaggacttagttcagtcactaatttgatacttgataccatttgatcaagctgaaaatgaggttgtagttgtaagacagaaaagtagtggcctggcttcgatttattttcggtcactttcactttcgcatttgccaaaggatacttacttcttatttgctctgaagcagaatccgatgctgtcgtgtagttattaacccatgcttgcaagccttgttcacaagcttgagctgtactataagaaccaacccgatcacgcgctagcagctttaaatagtgagcaaaacgtgacacacataaaatatattgcagcatagacgataagcgggcatttactgtcgatgcttcactatcgtagtgcttggcttgctgagccgaagcgttactataaaaaaccagatgctcagtattagtcacggatgaggcaggtataaacccaagttcagaaaattgcttttctaatttactggtcacaatcaaatctattggtggcttagcttcttttctgtatacatcggttgaaaagtaatttttcgtcaacccggtaacgatacctttagatattttacctggctcaatccctctgatttgaccaaaccaaccactttcagcataagcacgcactaaagtcgacacaaattggtacgcggcgtttccccataacatatctgtttctggtgctgttattttttctgtatataaaaagtctaagtgacgggtaccgtcgtttttatagggtgctctgactaaaacatgcggcaatacaagaccaacaaaacgcgcatcttccatgcctctaaagctacgccacttggtatattcgacctgttcaaattgattatataaatcgaattggtagccaagatcagtaaaactgtttgtaccaaataagcttgctgacacagcagtaataaatggcgaaaaggaggctgcggctactttcgaaatttcttttaaagtgtctatatcgttgtaaattgtacccggtgcattcccgttggtaatttcgtaatcaccaatcaatacaccaaaaggctctccacctggacggtcgaactcattttgataaattaattgaaagaggctactttgatcgaaatcgatagccttattaacatctctcgataatgtattccaatcacaatctaacaggcgtaactttacttttttttctttatcactgagttctgtttgtaaagttaaccaccacaaattgcgccagctagcttctaattgttgtaactttgggtggtgtaaaatctgatctaattgctttgaaataagcgagtctattttaacaatggtcagttgcaaatatgaactgattgactctttatcccactgcagtggcgaatcagaagagccttcaagccataataacagtgctttaaatgtctctttctcatttagaaagcgttccaataaagcactattttcgaagatatcagacgctgtattatgagaaaatacagcgtcagctcctatgaatgaaaactcttcacaattcattttgcatcatccttaatgcaggaagggttaaccaatctcagggattttggcaaccaatctaagtgatgacgttaactcttccatttgtaaccatggtcttaaccacgcgacagcattataagcaccaggctgaccaggaatttctttaactgaaacttttgcatctgctaaaggataacgtgctctgatatcttgaccaccaccctctgtcgcatttacgtaagataagatccaacgatttaaccaagattcaacgtcttctgcttccataaagctaccaattttatcacgtgccattacttttaaataatgagcaaagcgagaagtagccataaggtaaggcaagcgtgctgaaatagcggcattggcagttgcatcaggcgttgagtaaacttgcggcttttggcacgattgtccaccaaagaacacagcgtaatctgtatttttataatgacacagtggtaagaaaccaagcttacttaactcagcttcacgtcgatcagtaataccaatctctgttgggcatttaagatcaggatcaccatcatcactcgtgaatatatgggtaggtaaaccttctactttaccgccgccttcagcaccacgaatagcagtacaaaaaccatattgagagaatgcttttgtcatgttcgtcgccatcgcataggcagcattactccaacaataatcaccgttatcagtacttacagagcgaccggcaagctcatcaacttcaaactcttcatagttgaattcttcaacaggtttagatgctgcaccgtaaggtaaacgagataaaaatcttggcatcgtgagtgaaacaaagcgtgaatcatcgctgtctctaaatgagcgccacttagtatattcaagtgattcaaatactttttcaagatctcttggtttagtgagctcttcccaactatcaaaaccaaagagtgaaggtgatgatgccgaaatgaacggacagaaaccagcagcagcaacatttgacattaagctgagtgtttcaacatcttctgggtgattagtaaactcaaaatcaccaacaatagtgccgtaaggttcaccgcctggtgtaccaaactctgactcatagatttttttgaatgtttggctttgatcaaactcaaccgctttacttaaatctttatgaagctctttcttcttcatatttagtacacggatttttaatgttgagcctgtatctgaattcatcaccaaatgattaagaccacgccaagaaccttctaatttttgaaagtcttcatggtgcataatcacactgagttgtttcgatattttttggtcgatcaattgaatagcttcattgaaagtcactgtcatgtttttattccattgaacagtgccctttaaagcttcttcagttaaagtgcgtaatagctcttccgctcgacttgcgtctgtttgtttagttgcgccaatcgcttgggttaataacgacgccgattctgtcgttgctgctgtgtctaattcttgtgctagtgtttcggtgctcatttttcagactcctctaactttagctcttttgcaattgaatctagactcgctgtgttacttaacacttcttctaaaacattttctagttcttctgagcggtcaatcttagtcatgaggtcacgaagtttattgcgtgtctccataaggttacgcagtggttcaacttgatttactacagccgctggctcaaagtcgtcgatacttttgaagttaagatttacactaaatttagtaccatcatcagttaaagtattatcaacatctaacttaagagacgggctcattttttttaaaacatcattaaagttttctctatcgatttgaataaaacgacggtcttttaaaggttttaatacttctttattatgacccgaaaaatcccccattaccccaacaacaaaaggaagctctttttttacaattgcaccttcagtttcaacatcataggtaatgtgtactctaggtttacgtacacgttttaatttgtcatggatactcattcaaaactccttttactcggtttctgtttcgctaactttgatgccagacagcttaaagtatccggtcctagcatcactatcggttattaattcatttaataattctggtagcgataattcgctccatcgaataacttgttcaatggtgtaagacataggtgaatgcggttctgtctttctgaaaaactgtgctatttcttgcaacttatttatcgcactttctcggctgttgattaccgcatcattgcgatcagtattctcagctatagatgcatcatcatccactcgctcattgtcttgtggttcttgtattgatttgacttcaagagatttgagcttatctttgcctaaatgcaaaactgcatttaagcattcctcgagtgcttgcttaatattagaagtgggttgtgactgttcagtagcagcatcaagtgcaatgcttaatgcactaaattctgtgagagcctcttcaatgccgttttttaaatcgaggaaaaactcagcaggagtttcttgggcacttttttctattaactcaaaatcaatagcgccttgcgctattttcttttctcttttctcatcattgagcctagatatgtcgtaagcttgctgatattcccagtaagtaaatggttcataattttggctatctgttagagcgatacttttaatagggatgataagcgcgccatcacccgctacgccatttaaaccaacaagagcagaaactttatcagatatttcatcgccttcatcaagtgatggatagagtaactcaaaatgattacttataagctcatgtgcaactcgaaagccaaatgccaaacctttaaaaccatatacacgacataatgcttcaataaaccaggctaaatattcaatatctttactttctgattttaatgctgcgctgcattgttctaacaatggctgccagtcacgagcaagagaagctatgccctcatcatcaacgagtgcaaggcgctcggcagcacgtagctgattacgcatatcttttaaggaataatacgttgaggtaggagatacatctgatctaggctcaatgcccgcgaatgcatcttcgctaattggagctatatattcatcaaatacaaacattccattgccttacaaattccttttacacccaaaatagagacgacgtaaaataatacatctcttatttttaatttcaagccacaaaaccattaattaaaataaaattacaaaaaataaaataataaaacaaagcatcatccatattattttaataataggctatttgctcaataataagggcacagtcaaatcatcattaactagttttttattattagatttatccgattcttcatttttcactaaaataaaagtaacattatctcttgcaccacgcacaagagtggagtgaattaaagccataccagaatcaattatatttttaggacctaaagcaatactaatttctgagtcacttaactcaccagttaatccatcagaacaaagtaggaaaatatcatcagttaataaatcaccttcaacacaatcgactgataattcattttgtacccctactgcgcgtgtaattacattcgctaatgggtgatttattgcttcttgctctgtgagtaagccctcgtcaattaaatcattaatttgactgtggtctcgagataactgtaacaacccattcgctctgtaaaggtatattctgctatcacctacccaaattgctgaatacttattatctttgaaaaacaatacggtaactgttgtaccggccgttttgttagctaaaaaatcactgctatattcaagcagttttgtattggcactttttattgccttgatcaacatctcggttgaaattgatgacgcaggtaactcttcgacttcagccttgataacatctaccactagctgacttgcaaaatcgccagcttcatgtcctcccataccgtctgcaacaacccaaatgttatacttattaagttcaatataagcatcttcgttaagttctcgaacgactccgcgatgagacacggcataactaataaaatttttattcacacttacttacctgggtataattccattcccaatgctgccaacgtccatctagcattgcagccacctgatttaccggtggtaaacctgccgtcacaaaaacaacaggtttaatattgatagagccgtgagtccaccaaacgctgtaatcaccatacttattaagtaaaagtgaatgcaatacatcatctatagtcccatcagctaattcatctccttgaaactcaaatacaacagcagatttattttcatctggcgaaagacttttactgaactttttagcgggtgaatgacgaactttaagcgtattcagtacttttttctgccaaacactcaagtccacactgtcatcaagtacagataacacagcgtcttcataatcaagcgatagctgtttcgaatttaacgccgaaatgggtgtgctatcgctatcgatgagaactgtaaagggataatggcgcccaacagcatcaacacttggtaaaagtgtccccacttttgcgctttctgtgattaagttttcagacaatgcaaagtgccatactggacttgttaaataacgttcttgccactgagcacctaactgttctttacttactgctatagcagcctgtaaccaatgctcccaatgctctgaaaactgttggctgatcccttcttgcacaaagtcccccaaaaatggaaccttgcccaaatagccaatacctatagccttgtcggacatgaaaaactctctatacttgcgttccaaaatgggtgtctaattgaatttggtaataattcaacggttgcattattaccttgcagagaaaagtgcagctctaagtcactctgagtttctgctcgttgagcctttaaatcgtctaacattcgatagaaagaccattcgccactgtaactagtattgatagtcctgccaccataaggtggtgtaaacacaattctggttttactttgggcaacgtctcctggccaaacaatactttttactttcggtggaccatgtcgataaaccattgactgaccatcaacttcgatcatgaagctagaaattgtttggtcgagttttatcggctttaaaccaaactctatgcgtggcgtattactgttgccatcaaaaaacacctctcgaattctggctgcttgttcaaacattctgagtgctgactcactcactcctatgttcttttcaaatcgccatggactcttactggtatcaacactgggtgcaatataggtagtaaagaagttatctatcgtgcccttaggaccaaaaaagtcagagaaatctttaaggttaatttctttatctgagtgaggcaccaacgggtaacgccctacaattgctgcgttgtactcacgtaaaacactgcttctccagatttcgtttaagtgctgattggcactttttcttgtgatgtttgacgtatcttggcttatgttcaacaaccaattactggctggataaggtagccctttactttgaaactcaagctcgctcagaaactctggtttatttttaccacttagttggttttttacagaagacttaagtaacccaccacggtcaagttggtttaagtaaatatttagctctcttaaacttgcttgaattgtctcaagttgctgtggttcaatttctaaaatatcactaaatgcttcttcaacttgatagccaggaagcttcacctcaaattttggtgtttcattgggtaagtagcgcttaagtctattagccttagtatgcatagcgacttcagctgcatttgcagccactttaccggcagccttttgattttccgaaataggcaacttagtcaactgaacatttttttgaacagttgtaataatattttttattggcgcttctggtcccgctaaaacattagtaacgcgaacaccttctgttggtgaattgaactcgtttaaagtcagctcatcaacaaacgaacgccagtaatagatataatcttgaaaatacttttgctctaatttcttttcgatttcagcttttgagatatcgtatgtgtttgcagcttcttcaccgtaaacccaactacttgccatcaagttacccaacatcttgcttttctcgacattaaaaatgccatgataaccattgtaggtataaagacctgggatacctttcatcgcgacttcagggttttgaaaactaaattctcgtgcgctttcgtaacttataatgtctgttaattttattggaggaatgctgctttccataaagtcagcttgcagtctttgataagctctttctgcaattggcagttttgttaattcagctcgcgcaagacgaacagcttgatgatcaatttcctgcccagaaaaaccatgatccagtaatgctcgtgtatgagccataagatcactgcgattagttacgttcacatccccaggaagagccctttcgtaataggcactaaaccaggcaagtaaatcatcttgattataatgctcaggctcaaataacatcagatagctgcgtaatgtctcgtataaataactcaaataatcagcttgttgctccatctcagatgttagcgcattgagtaaatatggttctaggtacgtttttagtgaacgcaagtaggcactttttgaagcctctgttagctcttctaccttactaaaaccataagcctcaaaatcttcagcattaatttcattaacagggaaattctttaacttattaaagcgctgattcaaaacaagcagattacttttatctactgtattttgatctagcacttgatattcagctaatgcttgatttgtttcatctatcaaatcactattccatgaaaagctcacgtaccaagaaatacttaatgctattaaagtgatacatgtcacagctaagcatgacacgcgtaaccacttactttgcttttcatgatgtttgttggtacttgctaggttttgctcaggaaaaataacgctctctaacaaacgctttataaagaagcttctagtttggtttatataatcttttttcgttgaattttgttcagtcaacaaattagaaggagtcccttcttgcgttgcactagtaaggtatacaccacgaaatattggcagactttcatacgcatttggtgtaaatatttcttttaaaaaagaataacctacactttgaagtgcacgaagttgctttggaaactcaaataccttagagcggtttgctaaatcatgctcattaattaaacgtcgatttaataacgaggttaaatttgaaattagcccatgaaattccctgttaaacacttcaatttgattgtcagattcagcatcaagctcaaaagtaaccccccaaacttgttcggtttcttcatcactcagctcactaaaaaactctctaaacccttcaattaagtcaacttttgaaaaaataacataaacaggaaaggtcatgcccagctgcccttgaagctcctgtagtcgttgtttaatcgcgcgagcatgcaaattacgctcagttttagtttgattcatcagttcagagatacccatactgatgatcaccccatttacaggtcgttttggcctgtattttctaagtagtcctaaaaaaccttgccatgcttttgagtcgtgtaaagcatgactgttttgcgtggtgtaacgtcctgcggtatcaataatcactgctttgttggtaaaccaccaatcacaattccgcgtaccacccacaccgtgaattaagtctgtgcctagcttctcctttaaaggaaaatcaaggcctgagttattgataaagtttgtcttacctgaaccaggagggccaatcatgatataccaaggaagctgatagatattacggccgttaaagagcttggcatccttcaataactcgatcgcctcaaccattcgagtctttaaggttttaatttcttcttggacttcatctgcagaattagcatcaacctctatcagctcttctgtcatgctagtatttcgcttgctttgatttctaaattcaatcagtttaataacggtatataccagtaaaattgctaaaatagtgattgcacgagcagcgacactttcaaacggtttataatcagcgatcgcaatcagtggaccaccaaaccaaataagtaggaagagagctaaaaagccaactacgatcatcaccttacgagaagtagcagcgtacatagcgcgcttgcacttttgaataaaactcatcacaactccattaaaaaagtaagtcgatttcaattcggcggtttaatgccttatctgaattcgtattgctcactaaaggctctgcagagccttttccttctggccataaccttcccattaagccagtattcttagccattgaatttgctacttgtgtcgctctagctaatgataaatgccaattagaaggaaactgactggtacttattgggctatcgtcggtgtgacctgtgattaagattttgccttttgttccttcaaggcttagtgctaacttctctaaaatgggttggaaagagggcaatagtgttgcttcaccagagttaaacaaactctcattatttattgttattctgatcctgtctgtttgttgttcaacgctaactataccgcgttgtatctctgtgtgtaataactgagttaacaagtcaagttgcttgcttctattaccttcaacttgtgaagatgacaaaggatgaactgacttcaaattttcagctgtagcgtcaacttgctcattaagacgcatgttaaaaaataaataaaccacgagtgcaattaaagccaaaaccgatatcacaacccaaagtggaatttggtttctgagttctacacctgctgcaacacggcttttccaactaggtgtcaaaaattgactatgaggcccatccaactgattgaggatgtgataaattctattgcgataatcttctagcttgctttcaccgcttgctgcaactcgaaacttacctttaaagcctaaatttaaacaatggtattgtagctctaaaaagtttcgattcatttctggatgcgctagcgcttcatccagcaaagtaaaaaagtactcaccaccaaatgtttctttatgaaaagtggataataagctttcttctgcccattctaacgaactccactttgcatttaatacggcttcatcaattgcagcacataagcaataacgcgcattattaattactgtaagttcaattgattttgcacgtagatttgtctcaaagcgcttgattgattcaatagcacgatgttttaaagcagctaaactgtcaatttgtgatgactgattaataaaaatgatcaatgaaaagctatcattagcagcatcgagtaattcatttttaaaaattgatacagaactaacattcgccttttcaggtgaagagtgactaaacgagaccacggtcttgtcactcgagccttgcgatgcttctgaatttgacttgttacggcccaaacgtcctggacgtggtttaattattgtttcatccattgaaacgcttcctttattagcttctaattgcccaaagaattaagtttaaatcagggtagttacctgataaatgaagagcgatacccccactggattttagtttgctccagtgttcactgtttttattaagctcaaaataatgatatccagcatggtaaggtacttgacgtggcgctgtaggtaagccattgattgagatccctggtagctggttatttactaaatctcgaatcgactctacgctaccaattttaatttgcgaaggtagcaactttcttaattcttcatggggaatactcgctttgacagccagtacgaattgagcagagtcgagaatcgacttatctcttaatgcaccgaatgagataccaaacttactttgttctagcttaatttctgtggctgtttgttcaatcacttggcttaatgattggtaaagaaagttaacaacttctgcaaaaacaaactgtaagtttgcatgatcatattttggaagttgcggcacccgtttatttacggcactaaatgttgcaagttcgccagcaagctcaattagccgcgcgtacagttctcgaggatgaacacgagagtgcgttaataagctttgaaaaatagcatcatatttattgagtgtttgtagcatcaaaaaatcagccactgatgtgctacctgcatacccttgacatagcctgactgcaatactttctgcacgttgctttattaaacctgagacttctctaacaagagcggttaacgccttattactgataacaaataagctaggaggaacatacttagaatcaagtttaattgctccctcattcgttacttccgtgattcttgccagcggcagcaatacatacccggatgtatcatctgacattaacatcaatttactgtgaagttttgccacttggatgacttcttgagcctgagaacctaagctatcatcacttactgataagtctgcaatcctgtaacgtgtcactaattcgtcttcactagaagagatgttgatcccacttcccttcaaggctggaattgcaaggcatataatttcatcataggcacttttagctaccactaagggatcaggaagaaactcatcacttggcatctgaattgggcataaatctggcgaaatagccgacaatttatcaatagcaaattgaccggttacaagtagttcactatcaatttcgagttcaatgactccccatgaatcagcaacagtgccctctataactcttttaattacactagaaacatgcttatctgcttgttgaaaatgctgaggccttaagaacattccttctgtccatgcgacccgcgtgtaatcactcatgtttattcctttaatctttcatatatacagctaacgactcaacatttacgtcaatgtcatcgtagcctgtcggatcaacctctataacagctcgccaacgggccttttcaatatctctataagcgactaccacaccaacaaagcgagtatttctgtttaaattcattttgtattcaatgcttgacgaaggttgtaattcaagttcatcttttttaagaagatcaggcccaagtaccgcttctggattttcatataaactaaaaaaatcttgcgtatcgaaaatagttcgggagcttagttcaaacactttataaacgacaggtgaaggacggccagagatatctggattcacatctgaggccactgaaatgtttaaatcagtagatgggggcacaaacttgtttaccgttgtacaggctgttaaaaatacccacataacacctacaaaagtaagcttgaacttcaacattgcattattcctttattgtaatacaactaattaccactattgtatgccttcagaaaatcatcagaaaatgctaaaacccctttagctttaacatcatctgcaatgtcagcatacaattcgttatatatacgccagctagaagcaccgccatatgcaggcaaagagctaagtagaccacctttattactttgcgcttttatatcacgcggtgataattgctctaaaaggccattaagcgcccctgttgctcctgctagtaacccttgttcatgaagttttatatcaacaaaactttcttttacagcttcattcgcttgcaaaaaacttgcgctattacgaacaaaaagattctgcataacatcatcaatggttgctgaaaacttaagagggttattttgctcaactttaaaagttgtgtgattcaatttaagttgattcttaatatttgttcgctgacgaatcaaatccatcgagccttcaagaaaaagcttaaagcactcgcccatatgctgccatgtgtcttcattttgcagctctgcagctaatttttcattaacacttaaaccattcaaaaaagaaataactaatttcgaagagtttgaaatttgattatcttttataggtgcactaactggggcgttatttgcagctattgcactattgccattattgaacggcttactatcattaacagctggagtgctaattacaggctcttctaccggtaatacaggcacgctattttctttttctttaactgtagctgatagttgtgcgagttcatcccagtcctctggaatgggttgactgaggttttgttgtgaaaatatgtcaatgttttcactcggtgctttctgaaaagtaggcgcaagcattgcctcttcaagttcactagaactgtcgtaagccaattgctgctcagaagaagcattaaaattaccgcttaaatttgttggtagttctgtaggcggggtattgaaagagttgacatgtggctcaaaattttgagcttgttcatcttgctgtaaagttgattcaatttgaaaatcaccaatagtgagaatgtcaccatcatttagtcggtgtttattttctttaccaagcggtgaaactgaaaagtttataaacaatccatttgtcgagtagtcataaacatagaagccatctgtttcttttacaattttaccatggcgacctgatattactttttccggatcaggtaaataccaatcacaatcttctgaccgaccaaaagttaactcattttttactacttttttcgcatctatctcaggagaaagcctgtgataactggtaacatttagaatcacttccatttgattgttagtcccataaatacaaacattctaataggataaaatacttcgcagaataaagtcaacgcggaaaaatacccaaaaacagaatttaaataattttaaaaaacaaaataaaatacaaaaacaaataaccaatctaagaactaaaccttaagtaccagttcattaatataaactgaatgattgcttattgttgtattttttgtaaaatatgtccccagtcaaaaggatattgatttttataaaaggaattataatgactgctgagaatgataaaacacgtattgcctcaataaaaaataaaaatgcggtatctaaaggaagcaagcttcatttaattggtaaaacactctcaaaccgctacttaattgaagaattaattggtgaaggtggcatgggttatatttatcgagcacgagacacctacctaaatactcaattaaatcaagataatatagttgcaattaaagtattacaccctgagttagctgactcagaggatgctttattattgttaaaagatgaaacaataaaaactcgcactctttctcaccccaacattgtcaaagtattttcagcgtcttcaagtgacacctatcatttcgtcgtaatggaatggattgaaggtgaaactcttgagcaattaatcaaaagaagtaaaccaaatggtttgtctcaaaaacgagctaaacctattttaaatcagcttattgacgccctaacttacgctcactctaagggaattgtacacagcgacctaaagccttcaaacataattcttgattcgcaaggaaacttaaagatcttagattttggtattgcaaaaacaaaccttcaagaagataaatatgcagcccctgctaacaatgagcaaccaaacagcaatggttatacccccacatatgctagtcctgagcaactaaatggagacaaatcttcagctaaagacgatatatttgcatttggttgtattgcatttgagctattaacgagcaagcatccatacaatagagtcgctgcaaatcaagtagcaaaagatacaagtgtaaaaaaacccagcaacagttcattaagtgtttggcttaaaatcaaaaagtgtatttcacttgatgctgctcatcgccctaaatcattgtctgaagttaaatatgaactaaacaataatagaacttcattattaatccatgcagcttgctacgcattacttattggtggtgctgggtatcagtttttatcccaaagcgataaacagcaattgattgaagcaaactatcaaaactcgctcgcaaaagttgaacagcttgaaacatggatgaattggcctagtgatggtttaccgcaacgattaaatgaaattccaccacaatacaaagtattaaaagaagggcttttagctgttcatcaaaataaagtcgtagaaaaatttactaaacaagtcgatgatttaccaagaaccgccataaatacaagagcctacgatgaagctattgctatttatgacgaagcaaaaaatttctatcctgattcagagacattaaataataaactcgaaagcttgcttactgaaagacagtcaatcctatctgatctaagttaccgtttagatgtactgttatcgcaatctagatacgatgaaagtggtgacaacaacattcacggtcttgtatctcaaataaaaattatcgactctagttatacctatgtacccaaccaagagcatataaataatttcaaactggcagttttagcgtctattgaaaatgaagattttgttacacaaaaaacattacttgatgtaggtgaattagttttttccaatacttcagaacttgagccactcgttactgcattgcgaaaaaaagagtcagccatggtcgcattagctgaatataagagaaaaacgagtgaagggatgactgtgagttaccctgacgacgatgccaaaatattttatcaagaaaaattagaaagatttaacactcaacttgcaaatgtttcggactataaacagcttatcgagtttgatgagtcatttagtaaagaagctgaaatcttccctgaatcatttgagcccattttattaatcaaagatcaaatagcaacgacttatatttctatggccagtagtttaatgaaacaaaaaatgtatagaacagccgaaagacttgtagaacggagcgaagaaattagaaagagtctagaaaatacaatctagatcagaagattaaataatcaaacgtcagggaagagcgaatttgcacaaataaatttttgaacgctattctttttctttaacgtctaataaatagtgtaatttaatggagtaattatgaaaaaattaagtcttgcctgtgcactgatgatactagcaggctgttcatcaaccacagaagtttcgccagaaccagagactattgtagaacctgtagctgaagtgatagaggaagtgcctgtaacttcattaacggtcgttactacacctaacgatgcgcgtgttcgtatcatgaatattaaacctgtctacgaagatggtattgaacttaatgatggtaaatacgatattgaagtaaccaagcctggttatttaacctatcgcaagtggattgttgtagataaaaaaacaatattgactgtagatcttaaaagcatagagtctaatcaagctactcaataatatgaaactacttcccaccaaaggaaagcagcggctttccttttttgatcttcttttaaattaactgcaaatagtacagtgacgatagtgcaccgcaattaacaataattgttaaccaaagcacagcaataaaactgcgttttttggatttgtgtcttaaccattgctgtgcaattaatgaacctggccaaccaccgattaaccctaaaatatgcagtgttcgctcaggtactcttattgtatgctcgccatgttgcatcgctaaacgtttatcccagccgtataccaaaaagcttattaagctcgctacgctgtaagtgcctgcaataaagtaggtaatattaagttgccacgataccagccataacagcgctaaaaacaacaatgaaaatgtaattaatgttttcttaatcaacgaattatcacctatactttgcaaaacaaattaattttatcgggacgctattatggcatacctaaaatcacttttactatcaatctgcctgtgttcactttctgttttggcggcggagcaacaacttgatgacaagctaaaagtgtttgagccttacttaggcacatggcagtctgactttaatgtcgcagcaggtaaacctgcggtgcaagatgtgagtacctggcaacgcgcgctcaatggcacggctattaaaaccattcattctatcaatgaaggtgaatatggtggtgaatcgatgattttttgggataataaaaagcaatctttagtgttttattacttcactacggcaggtttttatacccaaggcacaatgaatgtacttagccctactcagtttgttgcttatgagaatgtgacaggcagcaaagaggggatcactaaggtaaaatcgacaagcgagtttaaaaacaacagctttgtggtgtcgacctcttaccttaaaaaaggtcaatggacaaaaccagatacccgaacttacatccgcagcgaaaaagcagttaagtttaaataacagcttttaaaaagggtaaggcgtttatcaccttacccttttttatcaatgcctaaagtcagccattaatgctgggatccctggcagcatacccaccagcgccatcacgcttgttaaaattacaaacattattaatggaatgatccaacggctcattggtgatagttcagagcttcgctctttacaaccaattaagcccaggttgtcgagcaacatagttaacgaccaaccaaatgcaggattcaccaaagtcgatgaaaacaccacaatagcagccgattgggtggttttaccttcgcgggtcatttccatgccagcttcaagaagtgggataaacacacctacaatcaaggcgacacataacacgggttgccaaatagctaaatccattgggtagccccaaatactggcaatgatacaaaataatgccgttaacaccgcacctgcaggaatggggcgcttagcgatggctgctggcacaatgtaagttccccatgatgaggtaaagttagagccgcctaacaaagaaccaaatgtctgacggattgaagcactaaacatggtatcgtcaatgttcatttgcactttttctgtgcgttctgggtaactgattttttggaatacttggtgccctaaaaagtcaggtgaccacatagcaaccgcaagcactgcaaacggcaataccactacaaagctctctagggttggtaagcccagcatccaaccagtgttttcaccccaccaatacattgggttcatatttggtaagcccggtgctgttttaaactcaaacggcgcacccagtaaaaatgcgattaaaccgccaagtaagcaacttaatggcacagctaaccaacgttttttgtagtgctcaagtatggcatacaacacgatagtcgataaaatcacaataaaagcgatatgggccatatcaatgccttcagcccatgcaaacagctttttaacctgcgaaatcgtgccgataaaaccaaggtagagcagtaaaccgccacacactcctcggctggttaagcccgccagtaaactccctcctttactaagcgcaagtaacagaccaaacgcccctatcagtaaaccaaaggccattgggtgaccacccgctgcaaccacaatcgggattaaaggaataagcggcccatgcgtacccgccagatttgccgttggtaaaaagaagcccgaaaataataaaatgaagatcgatacaattaatagctcatagcgcacgttttctagaataaaaccttcacctaggcccagtggcgctgcaaacgttgcagcaatagcaccgaccatgaccaccttgcctatggttcctgccattgcagggatagagtcttctaattcaaaccggtaatcacgaaatggtaaattaggacgccagcgcttaggctgcataatttgtaattcgtgttcaaggtattcgtcgcgactcgaaaattcactgctgggtttatgaagagcttgatagctttgctgatcggcatgagtatccgatccttgctcagcaggcgctgttgacgctgattgctgcctcgtattcatgagttctcctactgcctatcttgaaaaattatgtgagtttttattatgcagttagggtaaagcagccagatacaaaacacgattaggcaaatggtcgggtatgaatttataaaataggtgtttttaataagttgagagactcagaaaatacactcaagcaactgataattaataatatgtttagatttagcacttttaaagagtaagctttgggttgttttttaagcacattaactattagtctaataaattgtatgaatagcaggcaatgaagttattaggtcacagaagataatcgtcacgcttgcttggcgcgcgaaacaaggtattagatacgagttacgagagtaaagttacgaggaacgagatgcgaggtacgagatgcgaggtgcgagcatgtagcagcgattttacatcgcgttttatcgcgtacctcaccaatgacgcggcataaacccgctgctaccttgtaggcgtcacgcttgcttggcgcgcgaaacaagatattagatacgagttacgagatgcgagatgcgagatgcgagatgcgagatgcgagcatgagcctaagatgccttgcactatgcgactagtaattaattaacggctctgataaaaatacactgactatggaagaaaacgagctataagcccgttaagtttaatggaattactatccttgtgaggttcaaatggaaattgaagtaaacagaccaaaacaatatcatgataaaattagagattacactttatgggccgactctaaaaaaatcggcaaagtcaaacccaactctttagccaactacacaatacctgatgacgctgaatttatctggttctccattgattggtgctctagccctaaactttctgtcaaagatattcaatcaaataaagtaactgtttcgaacactatgagcaggaacttactatcgggtctatttttacccatttattacgttacttttggtaaaaataaatatctaacaattacgagcgatgtataaccacccttaatcgattttcagatccgattacttcatcgcataacgatatttttaccctttgtcgcggcataaagccgctgctacctgtaggcgtcacgcttgcttggcgcgcgaaacaaggtattagatacgagttgcgagagtaaagttacgaggaacgaggtgcgatcatgtagcagcgattttacatcgcgtttttctcgcacctagctcctagctcctagctcctagagcctagagcctagagcctaacaactagcagcttaaagctatttcgtctttaatttattcagctcatcatcttgctgtgcaacaagggcattaagcgtttgactgccgtctccagcctgcgttgataactctgctaattgcgatgcagcatctgagattaaagtaagattcctattaatctcctcggttacagagctttgctcttcagcggctgttgcaatatgggtaatttgttgcgtaatttcgtccaccttaacaaccacctcatgcagcgcatcaaaggcaacggaggtttcatctaccgcggtttgtgcacgcacaacaccttgttcaatcactttagaagcgttgcctacttcaagctgtaagctgtcaattagaccgctgatgtcatcggttgatgaacgtgtttttgaagcaagcgcacgaacttcgtcggcgaccacggcaaatccacgtccttgctcaccagctcttgcagcttctatagcagcattgagggcaagcaaattggtttgctctgctatcgttctgatcacatctaatatctgagttatgtcattactgcgcgctgcaaccttttcgaccgctttgtttgcttcttttatttcatccgacatagtcttaacttgtgttacagctgaagacaaacttttttcactactaaccactaaactatttatttcgtcagcttgttgcgccgattgttcagaagcccttgcaacctcaagtgctgttgcactcatttcgttcattgcggtcacaacgctttcaatttcttgaaattgcgcttgtacattatgtttagtatcaacagcaacactggttgcaatgtgggcttgctccttggtttgcgtcgatacatttttaagctcaccaattaagtcacgcaatttagcaagaaacgcattaaaacctgttgctagtgctattaattcagcatgggtatcaacatgcagggtttgggttaggtcgccttcagcactagcaaggttatcaacacgctgttgaatttgttgtaatggtgccacaatggtgcggatcactaaggtcatgataacaaaggctgcaccagcaataataatacccgtaaccaagattaagccgcctaacgtattggcgttttcactcatgctatttgccagcgcatgagggccctcaagtgcaagctcagctggtacttgaatcaataagttccactgggttttagcaagcttaatggtgattgggtaattaactaaatattcatcaccgactttaaatacaccactttgatttttcgctttaatgtaattgtctaaagtgcttttagccactgcctcttttagcggtctgcctagcttatctttgtaatggctactaccaaccactaaatcaagtgagcttaataaggtaactcgagctttaccgttatatagctcttttgacaatttttcggtcatgctttgaaatacaggcaaagttaaatcaacaccagcaacaccaataaattcattatcacgaagaattggcacagttaaagaggtcatcatttctgaataccctggggtgatttcgtataggtaaggttccattatgcagggtactttggtgtcttttacacacaggtaccactcagcttctcgctgaccaaattcattaagtgtatcgacatatttttcagccgcatcatctacgacttgttgctcaatggcgccatctcgattgcgtgtgaaatagatttctaaagtaccaacacccgccacagagtgatcataaccactaataaagttagcatcacggccatcaaacgcatttgcttcaaactgcgaataaatagatgaaagaatggtattttttttgagtagtgagcgattcaactcaaccaccgcatcgcgagttaaagtacttgctgcatcatgatcacctaagattgcggcaaatgaataaggcactcgatatgcttcgttaataaatccagcgacttgctcaccatatgcggcagcattggaggctagtttgtcttcaacttcagcaacaatcagcttttctgattgtgcagctaactgctggttgctgtttgacaactgccaccataaaacactcgataaaacaaacacagtaataaaaatactgcctactgtgagccataataactttttcgctaatgctaactgccgcatcgaaatgtcctgtttttattgtaggtttgctaatagtttagactatttaactaattttacagcccaaaaaaggagtaaagcattatttttaagtaatttattgaaaatgccctgttcgacaacggaattttgctagcatgcaattgaaatttatagctttgttatgattcggtttatttagattaacggcgtacaaagcatgacaaactatttaattagatggcttaacatatagcgagtaagcgctgctgagcactaaaataattgataaattgcgtttctttattacttgttctaagacaaacaaccgacaagcttctatattactaataagtacatcccaaatcacaatagataagcagctaatttacagcgtattttgtaacgagttaattataataataaatatcaacaagcgatgaccatgcagcaagacacatttgattttgaccaaataattataggctctgggtttggtggctcagtgagtgcgctacgcctaagcgaaaaaggtaaccgggttttagtacttgaaaaaggccttcgccgcgacgataaagaatttccaaagaccaacctagatatcaaaaattatatgtggcaaccagaaattggcttaaaaggctgcattcaattttcgtttaccagcaaagtcactgtgctgcatggtgtgggtgttggcggtggctcacaaatttatgccaatgtgcaccttattcctgatgatgaggtgtttcaatctccagcttggacacgcataaaatcagactggaaagaaagcctaatgccctactatggccttgcacagcgcatgttaggcagtgccaaaaatacctataccaatattgccgatcatacccttaaagagattgctgagcagatgggtcaaggtgactcgttcaaaaccgtgaacaccggggtgctttttgcaaagcccggcgaagcctataacaaagagctacccgacccttactttaacggcgatggcccaaggcgaaatacctgccattactgtggtagctgcatgattggttgtcgccataatgccaaaaacaccttgatgaaaaactatctttactttgccgagcgcaatggcgtagagataagaccaagctctgaagtaatcaaaatcaccccgcttaatgcagatggcagcgccggatacaaaattaagattaaagataccaatcatcgcaatagccatatttatacgctaacaacacgtggtgttgtgctaagcgcgggggtaatgggcaccgtgcctttgcttttaaaaatgcgcgataaagacaaaacactacctaatatttcagcttggctgggtcagcaaattcgtacaaattcagaaaccctcaccaccgcgaacaataccactaaaaaagttgatgatggcgttgcgatcagctcatttatttcggtcgataaagacaccaacattgaaatttgccggtttaaggaaggtgccgatggcacatggctatatttaccttacgttcctatggtgactggaaaaggcctcaagcgtatcgctaagttttttgtgaatacactgcgccatccaataaaaacagccaaagtattgcggccaaaaggcaaagcccgcagctcgattctatttttggtgatgcaaaaatccgaagcgtttattcaccttgaatggcgacgcaaatggtatcggttatttaaaaacggcattactgcagtgcaaaaagacaatgatgcaccgcttagcgttagttttccaaaagcagaagaagcaaccaaactctacgccgaaaaactcggtggtgtgccaggctctgctttaactgaagtgctctttggtgccccgatgacggcacatataatgagtggagttgccatggggactgatgcctctaacggcgtagttgatagctcaggagaagtgttcggctatcaaaacctgcgtgttattgacggctcaatcataccgggtaatttaggggtaaacccatcattaaccattaccgcattgtctgaatacgcaatgagccaaataccggtattcgatgcagcccgagccaataagataaagccaatcgagttcagtgagccgcgcgaaggcttagtgtcagcacttactggctcaggcgatttagcaaagtcgattgctgaaaaacaaaaaagccgtgcataaagcacggcctaatttgatcaatagcaattagataactgatagctctacagcaatgttaccgcgcgttgcgtttgagtaagggcatacttcgtgcgctttattaacaagttcaagagcggtgtctttatcaagatcacccaccgataccgcaagcttaacagcaataccaaaaccaccttcgataggaccaattgatacttcagagttaatgtgagtatctgccggtaatttaacttttgcttggccagccactaactttaatgcgccgataaaacaagccgcgtaacctgctgcaaataattgctcagggtttgtaccttgaccatcatcaccacctaaccccttaggagttgatagtgccacatctaagcggccatcatctgattttgctgtgccttcacggccacctgttgctgttgcttttgctgtgtatgcgacgctttgtagttctttcatgattactctcctaattgagtgaaaatatactttgcatgcaaaatatattagatcagctttttcgggattgcaaatactttgtatgcaaattaaaatgctcgtattgaattttgaggaccgagtatgaaatacccacagctaaaattagataaccagctatgccatcgcttatatatggcatcgaatgggattgcccgtgcgtatcgagattctcttaatcaattagatttaacctacccgcaatacgtcgtgatgatggcgctgtgggaaaaagatcagatcagcattgctgaattacttgaaaaaaccgctattgatggcggtgcgatgacgcaaattttaaaaaaaatgagcgacaaagcattgttgtcgatcaccaaagataaccaagataaacgcaaacgactcgtgcagctcgaagccaaaggcaaggcgatgcaagatcaagccgctgagataccgtcgcaaattcgttgtcgcttcccaagcattaacgaacaacaagcactgcaactgatcaaattactcgatttagtaaatagtgacctcaattaacaaaaattatttgaaagtgaatttggataataccagcttgcttaataaagtgggctttttgaggcaagaaaacctcgttgataacaaggcaaaaatttcgttatttagttgttctaaatgagaaatttttaacgctggtagcgacaggtttgctccctcaaaatgattacgtattattgcgagctggtatctaaaccctttttaataaaactagatgcgctatagtgttcaaaactcatcaatacggacaccatcatgaaagcatttggatacaccacagcaactccagcgttatcagactcatcactacaagcgattgaattaccagatcccgttgccacaggtcacgacattcttgtagccgtacaagcaatttcagtaaaccctgttgatactaaaattcgcgctaatgtatcaccagacaatggctataaggttattggttgggacgctgtgggaaccgttaaagctgttggcgacaaagtgtcgttatttaatgtcggtgaccgtgtgttttatgctggcgacttaacgcgccaaggtagtaatgctgagctgcaacttgttgatgaacgcattgttggtcttgcaccaacaagccttagtaatagtgaagcagccgccctgcccttaaccagtattactgcgtgggagttattgtttgaccgtttacaaattgaaaaatctaaaaacaataagccagcctctgtattagtgataggtgccgcaggtggtgtaggctcaattttagtgcagcttgccaaacagcttaccaatttaaccgtagttggtaccgccgcacgagaagaaagcgccaactggcttaaagacttaggtgttgatcatgtgcttgatcatagcaaaaaccttaacgagcagcgtcttgcggccgacttgaatgaatttgattacgtagtgagcttaacgcacaccgaccaacatctagatagcattatggaagtgatcaagccacaaggtaaattggcactgatcgacgaccctgcaagctttgatattttaaagttaaagcgtaaaagtatttcgttgcattgggaatttatgtatacccgctcaatgttccaaaccgatgatatgattgcccagcatcagcttctttctgagctctcaaccttagttgataacggcacaatcaaaacaacattgggtgagcatttaggtaagataaacgtagcaaaccttattaaagcccatgggattttagaatctcacaaagctcgcggaaaacttgtgttggaagggtttgagtaacgaggaataagttgcgaggtgcgagatacgagagtaaagaagcgaggtgcgaggcacgcgcatgtagcagcgattttacatcgcgttttattctcgaatcgctcctacctcaccaataacgcggcataaagccgctgctacccgtaggcgtcacgcttgcttggcgcgcgaaacaaaaaattaagattcaagttacgagatacgaggtgcgagatacgagaagcgaagtgccagcttgtagcagcgattttacatcgcgttttattctcgtatcctcctacctcaaccatgtcgcggcataaagccgctgctccccgtaggcgtcacgctagcttggcgcgcgaaacaaaaagttaagattcaagttacgagatacggaggtgcgagcatgtagcagcgatttcacatcgcgtttttcctcactcaacaataataacacgcatcattaaagtgcattacagtacttacctttcactattttagtgcctaatatcaggagcgcccttaccgccgaatattaaccaattgatttttaatacatttaaatttaatgacggtttggcacagatcttccaatagctaaaatgaactggcactaacaaggagactaacgtgactaacttctttcacactctttatctactttggcgattagacatcagcacatggcaaatgcatgaagcaaacgatccgcataatactgcagatttggagcgtcgctatgttaaataatgatcccgcatttattgaagcacttaaaaaaatttcggttcatcaactaacaattaccgaagcgtcggcgcagtacgacattcctaagcgtgtgttatacaaagctgcacgacagcaacaagttaaacagaacaagcaaaaggcgtatttaattgctacccagaagcgtttgcagcaaagcttacgcaatgtagaaatggagttagctagcttcagctaaataatttctgtatggttaaaatttacgcacaacaatgatggaataagtatgcacgcagtagaagtaaactttgatggcttagtggggcctactcacaattacgcgggattatcgtatggcaatgtcgcttcactaagtcacgcctcttcgcattcaaaccccaaagaggccgtgctacaaggccttgaaaaaatgaaggcgatgcacgaattaggtctagagcaaggtatttttgctcctcatgctcgccccgacattaatgtgctaaaacgcctaggctttaaaggcagcgataagcaaataatcgaaaaagcatttaaggcagatccgatactattaagagcatgttacagtgcatcagcaatgtggacagccaatgcaggaacaatttcaccttctgccgatactcttgatggcaaagtgcactttacggctgctaacttaaataacaaatttcatcgctcactagagccggttacaactacggcattgttaaaagccatgtttaacgacgagcgttattttagccatcatactcacttaccagatcaaggcttttttggtgatgaaggcgcagcaaaccataatcgcctatgcgacactcatgcagatacagggcttgagctttttatatatggtgcaagtagttttaatagtaccttaccaaagcctgttaaatttcctgcaagacaaacacttgaagcttcgcaagcaattgcccgtctacatcagcttaagccagaaaatcagttatttattcaacaaaaccctgatgtaatagaccaaggtgtattccataacgatgtaattgcggtggctaatggcaatgtacttttgtgtcatgaacaagcatttttgaaccagcccagtgcgcttaagcaaattaaacaagcttaccttggcaataaaccactgcatattatcgaggtgccaaccaataaagtgagcattacagatgccgtgagcagctatttgtttaatagtcagttgatcactttggctgatggcaatatgttacttgttgcaccaaaagaatgtcagcgtaatcaagctgttcacgattacattcaagaaatgatattggcagataaccctgttcagcaagtgcgcttttttgacttgcgccaaagcatgcaaaatggcggtggccctgcttgtttacgcttgcgtgttgcactcaatactgacgaactagccgcggtcaatccgggtgtacgattcagcgaagaaaaatatacccaattagtaagttgggcgaataagcattaccgcgactctttaagtagtgatgactttgctgatccactgcttttaaccgaaagctatcaggcacttgatgagttaaccagcttacttaacttaggctctgtgtatccattccaacaagaataattaatgaaaattaaagcagttcattctattaaaggagtgtctaaatcactcaatagtttactgattgatagcgttgccagtggcgcatcaattggctttcttgcccctttatcattaaagtcagcccaagactattggcaaggggtcgatgccgatttaacgaccccttaccgtcggctttaccttgcccttgatggtgatacggtgattggttcagtgcagctttctttgtgcgccaaagccaatggtgctcatcgtggcgaagtagaaaagctgatggtacatagcgaacatcaaggtaaaggcatcgcaaagcagctaatgtccaatctagaaaacgatgcccatactttaggcattaagttactggtacttgatactcgccagggtgataccgcctcttatctctatcgtaaacttaattatttagaggcaggcacaatcccagactttgcgaaaagctcaacaggcgagcttgatgctaccgtgtacttttataagcagcttacgtaaatcgcttaataggcctttccatataaccataaagtcgactaataaaattttttaataccactaaaatagtattgcgaatttctattaggagcgataaatggcgctatcaataaaggaacgggtactttttttagccttacttccccctttgctcattgcgattatgctgacactctacaactatgtgcaatcaaaacaaagtggcgcacaaacagtagaaagttttgctacacaaatggaaagcgatcgtaaatctgaagtcagcaattaccaaaaaattgccatgagttcaattgctcatctaatagctcaagataatggctctaatactgaggagctacaagataaggcaaaaagcattttacgtaacttacgctttgatgatgctggtgatacaggttatgtatttgtctatgacgttgaaggcgtcaacgttgctcatggcgttaacgcctcacttgagggcaaaaacctttatgattttaaagatcctaatggggtttatttgatacgagagctcattaatgccgcaaaaagaggcggtggctatgtacagtattcttggaaaaataccaatggtagtgtgaaccctaaactcggttatgccgctttagtacctaaatggaattgggtgctcggaacgggtttttggatcagtggccttgaacaacaagttgcaatgacagaacaacgagttaatgaaggtatcgataatgcctttataaacacagttatcgcttcagtattcgcagtagcaattaccgcagctattgcaatggtggtatcgcgcagtattaccaaccctcttcacacaaccgtgctagcaatgaacgatatatcacaaggtgatggtgatttaacccaacgattaatggttaaacgagacgatgagctcggcaaacttggcagttcatttaaccgctttgctgatgacgtgggtaaaatggttattgatattcgccaatcatcgcaatcgatgaatcaagcgtcacataaactcaacgagcttcttgccaatatgcatgctggtattaatcgtcaacatgaagaaagtgagcaagttgcaacggcaataaacgaaatgtcggcggcgtcaatggaagtcgcacgaagcgctcaagaagcatcaactgcagcagaacatgccgatcacctagtaaaacaggctaataaccagttacttatcgctatcaaagtaattaacggccttgctaagcaagttgatgaaggtgccaatgccgttgatcagctaaatcagcaatctagccaaattggcagtgtactcgatgtgatccgaaacattgcagagcaaactaatttactggcacttaatgcagcaattgaatcggcacgtgctggcgaagctggccgaggctttgcggtggtcgctgatgaagtgcgtacccttgccaaacgaactcaagatagtactcacgaaatagaggcaatgattgagcaggttcaacaaggaacaacaactgtaaacagcattatgcaatcaataaaatcaggaagtgcaaccagtgtgaacgaagcaagcgaagtcgaaaaagcgctcaatgaagtactgctttcggttaataccatcacctcgcagaatgcacaaattgccactgccgctgaagagcaaacttcagtttcagaagcgattaatcaaaacatgaccactattgttgatattgccaacaagactgctaatgataccgatgttgcgacctcatatatggatgaattaaataacaccgcaacgcagttagaacagaatgtaagtcgatataaaacttaaatatttaacgattgttaagcaggtcaaaataacctgcttaacaaaaatcattggttttttgtagcgtttttagccagtcaaataagtcgttgtcatagcgttttagtcgctgttggtgcttatcatttagactataaaaaggtgctatacatatacgcttctcagccataactatcacagtacgaatgcctaacactgaatagtgatgaatcgactgtactttttttgcatccatttgacggcattgtcctagtaaattacggtaatgcacaccatggcggcacacagtaaaattacgtttagaattaacaactaacaaacctaataacagcgaaatgccgcaaactaaaaaactaaaaataaaactactcacttctgctttgctattaataaaacccaccaataaaagcatgttaagtgcacttaacagtgcaaagctcctagattcatagcgtttctctaaatcgatgactgtcattcttgttcctaagattttattttttgccatgttgacaacaaaatgtggaagaaaaatggatttgttcattattgagattttatttggcagtttttattaaaccgcctttcactagcttttaaaaaggtacaaacgcgcggatcttaactcagttaaagcaattcaacttacattaagttttggtgactaaactattaataaatttttagaacacaagggaagaaacaatgaacttcaaaactacattacttagcagcgccgttttatttgcacttgttggttgtggctcagacaacgacaaaaaagaaactgtagatccgcagccacaaactgcgcaattcacgcttggagtttctgacgcaccagtaacaggtttaaaagctgtgaatgttgtgttcgattcaatcacgcttaaaagccaaggtggtgaagagttcactttcgaaactcgtgagcaagatgatgaaaccatgcctgaaatggttaacttactagattacacaggtgatgacattttctcattattagaagatgaagaagtgccagcaggtgattatcaatggatccgtgccgatgttattaatggcgacacaaacgatttaactatgacatcgcatgttgtgtatgaggatgacagcattgcaccacttgttgttaaacgtaaaggcaacgatggtattggtgaaatccaacttgatggcttcacacttaaccaagctggtaatgattttgttcttgagtttgaccttaaaaagtcattagttgacccacaaaatagcgacgagatcttcttaaaacctcgcggtgtgagattagaaaacttagctgaatcgcaagacattgaaggcacggtaagcgaagagctaatcgctttttgtgaaacagataacatagacattgcaatgactgatggctcgtttggtcacgctgtttatctatacaacagcgatatagaaatgccaatggacaactacgaagtaagcgaagacgacacgcccgctgatgcaccacttgcaaccgctaacgttgttttcgataacgaagataaccaatacgaatttgaacttgcgtttgtaaaaccaggtgactaccaactagcttacacctgtgcagcacacattgatgatgccgaaactcaagacgaagcatttacgctttatcaagtaaaaccaattacagtcacagcaggtgaagatttagacgtatctttcactgtttctgaataaagttattataactttcttaccagcatagttacttgaagctatgctggttttctcgttgttactatatgaatatgttaatattataagccatacctaaacagcctaggctttgttatgacatcgcgtattctaaaatcgattttttactcatcttttctattaggttctgccgtatttttgcaaggctgccaagaacaacctcaatctgatcatatcgccgtcactggtgggcttattcaagggcagcagcaagggcgatttattgcgtataaaggcattccctatgcagcagctccagtgggagagttacgctggcgagcaccgcaacctgtgccaaagtggcaagatgtaaaagtactgagcgattacgcccctgactgcatgcaaaagccgtttgcagcagatgctgcaccgcttacaacaactccttcggaagactgcctttatctaaatgtatttaaaccgactaaacacagcgatacaccttatcctgtagtcgtctggatacacggcggtggctttgtaaatggcggcgcatcacccgctgtttactcaggtgaaagctttgctaaacaagggattatttttgttagctttaattatcgattaggccgatttggcttttttgctcaccctgcacttgctcgttttgaaaacgatgcattgggtaactacgcattaatggatcaaattgcggctcttgagtgggtgaaacagaatattgctcaatttggtggtgatgcttcaaaagtgacactgatgggagaatctgctggcggtgcatcggtacacgcgatgatgcaaactcctgcagcaaataacttatttcaacaagcgattattatgtctgctggcgggcgagagttatttaacgagttgccactttatagcaatgacgactcagtattaagcgccgaaaaaattggtgaaaactttgccaagcaacacactatcttaggtagtgataagaatgcgctggcggcattacgtgaattatctgctgaagaagtcgttggaaacctcaacctaagtacattaaacaaacaaagtactaatgagtctacttacgtaggtgggccaatcattgatggcatcatcataaatgcttcaactgaagcacgtttgagtaaaggcacatttagccatgttgctaccatggtcggcacaactgatatggatttaggctttgcaaacttttcttcaaaagaggcgctatttgaaagctttgctcctcactcgatacaagccaaaatggcttacgatgcacaaggcgacaccccactgccaataattaattaccaagttggacaggatgctttaatgcaagagccagcaaggttcgttgcaaagcgtgtgacagatatgggtaatgatgccttcttgtatcgttttggttatgtagcgcaaaccttagataaactcggtgctgaacacgccagcgagattccgtatttttttaatactgtggcagcgaaatatggccatgtcaccactgagcaagataagcaagctgctaaaataatgcaccgttatgtgactaattttattaaattaggcaccccaaatggccccggcctaccaacatggcaagcttataaaaatgatgagtcttttattctgcaaatgagtaaatcagggactgcagaatttttaccagaccccttacaagcgcggttaaacatcacagcaataaaagctgaacagcaataatgaaataaggcgctaaattaagcgccttatttttatccctgctgctggatatattcaagcgcagtcattttttggtatgtcacattaggatgaaatacatgggtaggttcggggtcaactacttcaatgggtatgccctggctgcgtgctatatcgagtgccatttgcgtaatattgacgctaaaagaggtgcctataaacacaattttatcggcatcgagcatgcgctgttgcgcctcagaaattcgataaagttcagtgtaatactcatcaaataacaacacgtaaggcttaaacgattcgtttagcttggggctttcattattgatattgaacacctcaagcaatgagttgtgtaggttgtcttcgttaactttatcccacggcgcattgaaggccatcacatcagcaccttgatggtgaaacagtgtcatttgatccaaacgaccatgaatagcaatataatccgtgttaccggctttgccatcgaggccatcaatattttgtgtaataaggtttttatcgctcaaccaatgatgcacctcattgggcccatggtgtcgatacgttgcaaaacgatgataataccaagctaaaaattctcgcggattgttttcgtacatggcgcgggttgccatttccatcggcgtataatttttactgcctatggtccaaaatccatcttcgccacgaaaggtcggtataccgcttgcggcactgactccggcacctgtgatataaagtgtattcatagtgataattcaaccttatagccaagtgcatcggcagtcacttgttgattattgtccataccaccaatacggtacaaactaccttgatgctctaataaaccacgatgatccatacttgcagttttagcttttggcatcatttgccaattgtttttatcaacatcaaaacgccaaacatgattactcgccggtgctggcttcccgttgtatccgatgccattgtaattatatgggtttgcagaaccgcccaacatatagatatcaccattaaaactagttgcagccatacgatagtgggcaacacctgttggatgtggcacggtacgccaatctatttttaatggattattagcatcaatagtgccttttaaacactgtgcaaccgcagcaaaagaacgacgtttatctgcattggcctgcgtttttacaccatcacacactaaaattgtgttgccactaattgccgctgcttggccaaatactggctggcctaaaaatggcgaagcctgttgccaagtatctgttttggtgtcataaacttgtactaagttaacattaccatcgttatgccaaccactgactaaatagatgtaacgttgttggtacgaaagcgccacactgtcatcaacaggcacgggcatattggcgagttgcgtgtaagaattcgtaagtacatcgtagcgatatacatcaggggtagaaatttcttgatgatccgcacttacagtatagccaccaaatacataggcatgtttaccaacacccactgcggtgctcgctaaacgtccaactagaggctggctactcggtaccgcttttgctgttcgccatgccgactcaccaactttgagtacccatactttattatgaatatcatggtgtgctttcccttttcctattcccataaaacttaggaaataagcttgttcatttacaacaacttttgcgacagcattatttgcaactgcttcgggtaaggcaggaattgttgcaagcgcaacagaaaataataggctcatatcatgataaaatcagctaaaaaacatcgcataagaataccattttatgagcctgagaaaagtatcaataagcgatactaatacgttgatttaaatgcgctgcagactgcgcttcatcaagcatcgctttcgcataatcggttactgatattttgctttcgccgttggcatcagtaaagaagctatcaccaccaacacggtatgggcgctctgactcaccgggataaataaccgcagctggtgatacaaacgtccatggcgtatctgttgttgacgctttaaatacttcaagcgcttcgccttgagcgattgcttctgctttgtattcagcaggaaaatcagggtttgatacaagcgttacacccggtgcaacttctaagctacctgcgccacccacccataaaatgcgcgtgccagtaccggcaagtgcattcagcaattgctgtgctgtgtttgcaacaatttcatggttacctaaagcacgcccaccaattgccgcaataacaacatcactacctgcagcagcacttgcaatatcgtcttttgttaaatcaaattcagtcacagtaacattatcttgcgttactttacttacgtctcttactagcgcattaacttgatgaccacgtgctaatgcttctgatgtaatgtggctgccaatccaacctgttgcgccaataactgctaatttcatgaggaattctccattgtttgtttcaatgatggcagtttacttgttcactatttactgataaatacactatatagatacacattgtttcactttaagataccaatggataaactcaactcaattactagctttgtcgaagttgcccgcacaggcagctttactcaggccgctgagcacttaggtttaagcagattacaagtttctaggcatattcaagatattgaaaagtggctaaatttaaggttgtttcatcgcacaacacgaaaagtcagtttaactcttcaaggtgaagaggcccttagctattgccagcaaatactcaatcaagtgtctgacttacaaagccgagcacacagccacaacaacgaattggtgggtaccattcgagttgcctctccgattgggcttggccaacataaactatttgatgccattgaagagttcaccaaacgccatccacagacgcgatttgaactgttactctcagatagtttatcgcagctggttgatgaccgcgttgatatcgctttgcgttatatccaccagcccgatgaaggactcattgcccgtaagctaatgtatatcgcaaccgcagtgtgtgcatcaaacgactatttagctgcgagcctaccgattaatgagccaaatgacttaactgcacataattgccttattcataacaaacacaatatttggcaatttcaacgcgacgacaacactcaaaaagtgactgttaagggcaacattgttgccaatgatatgggtgtgcttttaaaagcagtaaaacaaggaatgggggtggctcatttaccctgcgatctcgccaatgactatttagcatcaggtgagcttattaaagtgctaccagagcatacaactataggctctcatttatgggcggtgtacttatcgcgtaacttccaacaaaatgtggtcagagcgttcatcgactttttagctgagcactggcaacacgatatcttataatccaaatctgctgcatgtacgtataagcaaacaaaaaggagtcgtaatgcagcacttagatcatgaaatatcacgcatcatagagatggcgtgggaagacagaaccccgtttgaggcaataaaccagcaatttggtttaaatgaaaaaagcgttatcgcgttaatgcgtgaacaattaacaagctcgagctttaaactttggcgaaaacgcgcagcaggtaggcaaactaaacacttaaaactacgaaaccctgatatcactcgcggctactgtaaaacccagtacaaacatcgataacgctacttgagttgttcagcaaactgcccaacagcatcaacaactttttgagcgccattttgtatatcggccatcacttttcctgactcagtagcaaggctgaaactttgttctgccttgcttttacctaattgaatgactccaactgtattttgtgtaagcacacggttttgttgcaccacatcaacaatctcaatggttgcgtttgaagttctgcgggcaagttgccttacttcatcagcaaccacagcaaaccctcttccttgttcgccagcacgagcagcctcaattgcagcatttaatgctaatagattggtttggtcggctatacttcctatgctttgcacaagtgaagctatttgttgcgattgcttatcaagggcagccatttcttgcgctgcttgttccatttgttttgctagcgcatccataacttgcaccatgttatgcaatacttcagcaccttgctgagcaatcttgtcggtttctgtggaagtgctataggctatatctgcggcctgagaaatagccatttcaagcttaacttgttctgtaatgacagtggcaaactttacaaccttataaagttcaccttgctcattaaagatcggattataagttgcctcaagccacacaggatcaccttgcttatcgacacgtttaaagcgtgaagcaataaattcaccttgttgtagcttttgccaaaagtcggcatattgatcagagccaacttcatcagattcacaaaacatactatgatgcttaccaataatttcttgtgctgtgtaaccaacccccgctaaaaattgctcatttgctttaagcacataaccatttaaatcaaattcaatcacagccattgagcgatggattgccttcactaaatcctgattttcacgggaggtttcaatggtccgcgtcaatacgcttgcatgcagagtaattttttgaaattgcttatctttgttaacaacacggtgtaaaaaaacacgcaaccatactgggctattttttgcgtttataagctgtacagctcccacccaaacggtttgttcatatagcgcttgcttaaaaagctcataatggggtgtttttcgggcagtatcagggacaaaatcaagtaaagatttgccaagcaattgtttttcagaatacccaagctcagttaatacgtgctcattaaccgagaggatatagccatcttcatcaagctctaaagtaaacatactctggtctaaagtatcttttacttgcataacactaaataattcattctctaaatcggcaattctattcttcaatggctgagtaaaaaacatggctcttctcaccttaaaatcatatgaaaacaacacagagcagtactctaagaactacatgagctgtaacttttaatgattttagccgaattgaatgaataaaaactcagcttttacgacaataagaagtttctcgggtgaaaataagaaataatttaattttttgaaataataaaaagcctagtaaaactaggctaagcatataagactatttaagtttgtttacaaactgaccaattgtatcaaccacctgttgagcgccatgctgaatatcttccatcactttacccgagtcatttgacaacgagagcccttgctcagcttgtatcttaccttcttctatcacttttacggtgtttttggttagtgactggttgtgttgtactacatcaacaatttcttcagttgcttttgaggttcttgaagctaactgccttacttcatcagcaaccacagcaaaccctcgcccttggtcacctgctctagctgcttcaattgcagcattaagcgctagtaaattggtttgttcagcaatactactaatactttctacgatatttgaaatttgctgtgactgcttatcgagcgccgttatttcctctgcagcttgctccatttgctgagcaagatctgccatcaccttcatcgtgttacgcaaaacatcagctccttgctgagccagtttgtccgtctcaaccgatgtgctgtaagctatttctgcagcttgcgtggttgccagttcacggtttacttgttcagtaataaccgttgcaaacttcataactttatattgctcaccaaaatcattaaaaataggattgtatgacgcttcaagccacacggtgttaccgtatcggtcaacacgcttgaaacgatcagcaataaattctcctcgccttaattgctgccaaaactgcgcatattcagatgactccacaacctctgattcacaaaaaatacggtgatgcttgccaacaatctcttctttcttataacccatagaatctaagaacagctggtttgcattaatgacttttccttcaagatcaaattcaataacagccattgagcggtttatcgcattaataacatcactattttcacgagatgtggcaattacatccgtacatacagaaccataaatagcataataattaaattcaccatgctcatttaaaactggttgaacaataatacacagccactcaacctgcccatcataacgagcaacctgcatttgccctacccagtgtcgttgatttgcaagtgcattatttaagtctgaaaactgataagtattgcgtgattgaggggttataatcgtttgaaaaggagcatcaattaacttttcatgtggataaccaaactcatttaaaaagttttgattcatgtaagaaatcgtacgatctttacgaagtttcaataccagcatttcttcatcaatgcctgaaataaggcccttgagtggatggagctcagcatttaatgctgctatttcattttgtaatgctttattgaaccacatataacgccctagattaaatcactaacatattgttgttaatgtgattgtagaacattcagtatgagatgctagttttgggcacttatatcgataaggattagcaagcctgtgaggttaatttgacatacttgtcggctaattcatctagtgactctcggtgatttgggtctggcttaatgcagtcaattggacacacactcacacaggtaggattatcataatgcccaacacattcagtgcatttgttagggtcaatttgatatatcttcgcccccatataaatagcctcattcgggcactcaggatcacacatgtcgcagttaatacatttgttattgatgagtaatgccatgacacacctttaagcacgatgatggagtattgcctttaaaagctaatctagaattcaaaaagcagcgaaaattgcagccgcgtaatatagatggctgcgaatgaagtttctttgatctagatcaaacgacaagccactctggaaaagtaattactttggccgacaattcacttaaccataaacaattgcaaactccttaagtacactttaacagaagcaagtttgcttatttaaaaccctaaaaagagccaactcatttttactatccgttatttaaaaacactgtatttcatatagttaccatcttgactttactttttaagctcctgaaataaaaacagtttttaaatatttcgttgcgatagaagctgtcaaaaccgacccattcctcgtttaattttcacacaacttttttaacaatttattgatatagctgttgacgtaaactgcaaatcacactacccttttctggaagcgctttcataagggcgattttcaacctctttatggtagcgcttccagatgcatttaataatctattttcgacaacaatatcatgccctaattgcatgaataacaatgataaaaatgagggaaacctgatgccaagccataacttcaaaagaacaaagttagcttctagcttatctttgcttttaggtgctagcacctgcttttctgcctatgcagagcagtctgaacacaacgatgacattgaagtcattcaagtaacaggatttaaaggaagtattaaagaatcaacccaattaaagcgctactcttcaggtgttgttgatgctatttcatcagaagatataggtaaattcccagatactaacctagcagaatctttgcaacgtattacaggtgtatcgatagaccgtagtaatggtgaaggctcaaaagtaacagtacgtggttttggtccagattataatatggtgactttaaatgggcgtactatgccagcagcctcacttcctgctggcggtggctctccaaattctcgtgcatatgattttgctaatttggcatcagaaagtgttaagtcagttgaagtctataaaaccggaaaagcaaatattgcatcaggtggtattggggccacaataaacattaatactgcccgccctctagacaatccaggtttaattaccaatgttggtgtaaaagctatgcacgatacaactaatcgtgtcggcgatgatattacaccagaaatctcaggtatctttagttggactgacgaagaagcgaagtttggtgtatcacttactgcaagcgttcaaaaacgtgatagttcggcagcaggtgcttttgttaacgaatggagaacgactgcatacgacggcacaattcctcaatctgcagatgacatcatcatcgaaaatgcacctgcaatggggcaatattattcaatgccttccgatcttcgttacacaatcgccgatcgtgaacgcactcgaacaaacgcgcagctaacactgcaatatagtcctgtagagtcacttaccgcaacacttgattacacctactctcaacaagagttattcgagtcacgtgctgagcagtcaatctggatggataactataaaacgcacttaatctttgatgacaatgcggttaaaacaccaatctactataaagaagaacgccgcgatctatcaacgcgtgatctaggcttagcgttacaagagctcaatcaacttaataaaaatgactctattggtcttaatcttgaatactttgtaaatgaccaactcagttttgtatttgatgcgcatagttcaaaagcaacgagtgagcccgatgcgccttatggcagctgggtaaatgcagggttaggagcgaatattgtcgcttctcaagaagtcgattttagtcgtgatttaccctctatggtgattgattttgatgattgtagtcgtactaatttaaactgtaatggagtgttagaccaagatgacgttggtacttctatacttgattctaactttgcacgccaagaatcaacggttgatgaattccgattacttggtaaatatgaaattgagtcaggggtaatagactttggtattgagtcacgctcaatggaaagtcattcattgcagtcacttactcgtaatacgatgggtaactggggtatcgaaaaccctggtgagttacctgatggctaccttgacccgacaaatttcttaagtgaattagacggctacaatacctcaggttcatttgatcaaggtttcactggcagcgcgtcagaaattggttattgggcagcaagccaatacgggtttaattttgcagcagatggcgcatttgcaacaaatcgtactattaaagaagatattcaagctgcatttgtacaatataagcatcaaggtgaaattggtgatatgccatttaacctcttagttggtgctcgttacgaaaccacagatatcacatcaacagcaaatattgacttaccaaatgcagtcgcttgggaaggtaataacgattttaatgtgcgatatggcactgacaaacaagattactctctaagctctgattataatcactttctacctagtatcgattttgatattaacgtggttgatgatgtaaaaattcgtgcttcatatagcaccacaatcgcacgacctacttatgataatttaagctctgcagcaacggttggagtaccaacggggccaagtttaattccaggtaccactaatgcaccagcttcaacgggtaacccaggcttagtaccgcttgaatcagataatatcgatgtttcagctgagtggtactacagcgatgttagttatgtttctgtcggttattacaataaaaaagttgataattttattggtttaacaccaatgactcaaaattactatgacttacgagatgtttcagcaggtccccgcgctcaagcagcaaaagctgaactagaggctagaggtcttgccgtaactgactcaaacctattccaaatggttgcagccatggaaaatggagttgcttttgattcaatgacttatgaagagtttgaagcagcctacgatatcttgcctaacagcgatgatccactaatggaatttacagctcaagttcctactaacaataaagatgcaaaaattgacggatatgaatttgctatccaacatttctttggtgattcgggctttggtattcaagcaaactacacgattgtaaatggcgatgttgactttaatgtcgcagcagatcctacgacaacgcagtttgcattagtaggtttaagtgacacagctaacttaattgcaatgtacgaaaatgataaatttcaagctcgtatagcctataactggcgtgataaattcttaaacaatgcggctcgctatgtaaatgaacctgcatttactgaagagtattaccaagtcgattttaatgtagcttataactatagtgagaaactctctttctttttagagggaattaacattacagagcaagacaaccgccaacatggacgatacaaagcgcagttatggaatttagacaaaaatggtgctcgctacaatttaggtgtacgttataacttctaagctattgctgaagcaagagtatacggtctaatagcaatttacataatatgtgggctcttggggatagaaaggcgttattatttagttattcttaattagatatttttaacgctaatagcgtcaatttagatccccaaaagttcacgattagcgtgaattgataaaaagccgctcctattgaagcggctttatatttaaagtaagcatatgagcaaaataattaataatattgtgatcattggcggtggcgctgcggggtggcttacagccggattactagcaaaagaacatccacatcttcatatcactctcattgaatctgctgatattggtatttctggtgttggtgaaggcacatggccgtcaatgcgaaatactttacagcgaattggggtcaaagaaactgactttttacgtcaatgtgatgcgtcctttaaacaaggttcaaagttcatcaattggcgaggagaacagcaaggagataactattatcacccttttatgattcctgaaggctactatgaatatgatgttcatgctgcttggaagcaattattttctcagcaaaaatatgctgatgctatgaatatgcaaagctttatttgccaagcagcactagcgccaaaacagattaatacaccacagtatgctggtgttacaaattacggctatcatttagacgctcataaatttgcacgctttttaacacagcattgtgtaaatacgcttaacgtaaagcatattgttgataatgtgatttgtgcaaataacgatgagcagggctacattaaaagtgtcagcacacagcataatggagcgataacaggtgacttatttattgactgttcaggtagtcaagggctattaatcgccaagcattatcaaatcccgtttttagatcaaagccacattctatttaataacacagcagtagcagcccaaataccatacgaaagccaatctcaaaatattgcctctgcgacattatcaactgcacaatccgctggttggatttgggatataggtttaccaaccagacgcggaattggctatacatttagcgataaatattgtgacgaagcaagcgcaatagaaacactaaaaagttacgcggcacaaacgataggcactcaacaagcagacaaaattgaaacacgaacacttcgttttaccccgggttacagagaaatattttggcataaaaactgtgtcgcgattggcatgtcacaaggctttatagaaccattagaggcatctgcgttagccatggttgaacttagtatcagtatgctaagtgagcaaatgcctgtagaccaagatcacatgcagctattaagtacccggtttaataaacgttttaaataccgctgggagcaagtcattaacttcctaaaacttcattatgtattgagtaatcgtgatgataatggttattggcatgctaaccgcaaccctaatagtatcccacttgaattacagaacttgttaacactgtggcagtatcaagcacccagccgatttgatttggtcgaaaatgaagaaatcttttcttctgcaagttatcaatatgtgctgtacggtatggggtttgaaaccagtctaaccacaaaacttgatggccaaaagtgccacaaagcagaacaactataccaactcaaccgcaacaagattgcacaatacttacaaaaattacccactaatcgactgttattagaacaattacaagggagtaaggtggcaacatgagacaacaatcaattaaacaggtgatcatcgctggcggcggaactgccggttggatgaccgcagctgcgttagccaaattactaaataaagatattaaagtcagcttagttgaatcggacgacattggcaccgtaggtgttggcgaagcaaccattccacctattcgcacctttcataaattactaggtattgatgaaaaactttttatgaaagctacccaagcaacctttaaattggggatcagcttcgagaactggcacaagccacaaagtgactatattcactcttttggtatgacaggtaaagaatgttgggctggcgagtttcatcatttttggttacatgcaaaaaaaatggggaataaagacgactttggagattactgctatgaattacaggcagctaaacaggggaaatttggtattagccctcataacccaattaattatgcatttcatatggatgctagccgttatgcggcattcttacgagagtttgcagaaaatctaggtgtaaaacgctttgagggcaaaattgaacgagtaaataagcatgctgataatggttttataaagagtttattgctcgatgacggcacagagataacgggtgacttctttattgattgcactggttttaaaggtttactgatagagcaagccttacatactggttatgaagactggtcacatctattaccttgcgatagtgcagtagcagttcaaacgaaagggacacccgaaatcgctccttacacgcgatccattgctcatcaatcaggttggcaatggcaaattcctttacaaaatagagttggcaatggcttagtctattgtagccgttatttatcagaccatgatgcaactcagttattattaaataatctaagcagtgaaactctcaccgaaccaaaaattatcaaatttaaaactggccgacgacgcaagggttggaacaaaaactgtttagcgctgggtcttgccagtggttttttagagcctcttgaatcaaccagtatccacctcatcatgactgggattattcgctttatgcgattatttccttttacaggcataacccagcacgctattgatgaatacaataaacaattacagtcagagcttgaaagtattcgtgactttattgttttgcattacaaagtcaccgatagggatgacagtgaattttggcagcattgtaaaacaatggaaacacctaagtcacttgcccataaagtcgcattgtttaaagagactggacgagttttcttagatgatggtgatattttccgcgtcgactcttgggtgcaagtcatgcttgggcaaggcataatgccggagcaataccatcacgtagcttctttgatgaatgatcaagagctaagccgatttatgcaggggatcaaacagcaaatagcgcaacgcttacaacaattaccgacacatagagcgtttattgaacaatactgccctgtagatacttaagtctaaaaaggcatcactattgctaaaatacttataattaaacgaactgtaaagccacatcaaaaatgtcggctttaccttaattgcaagctaaatgatgtctcttttgacgatacttataagcgttaaactttcctaactattgaagagctgagcgtgctggctgtaaaaagttaaagctagcaacataatacagcacctagcttagttacgtcgttattagctcttaaattagcgctaaagttataaaagtaataaaccattaacctattaattattaaaagataaagcagattttcactgtatatttcgagctaaataaaataaacggttgaccgtttgcagattagcctctaacctaaatatggaagcgctaccacaaaacaccaaacacccttatggtttattacggtaattttatggaagcgctaccataaaattttaaatttagccgcaagatttacttgctcttgtttaccaaaggtttcatttcatgactcagctcacgttaccaaaaaactcaacaatgcttagcaaagactttatctatggcgttgcgacagcttcgtttcaaatagaaggagctgccgataagcgccttccatgtatttgggacaccttttgcgcgactccaggaaaaatcgctgataactcaaatggtaatttcgcttgcgagcatgtcaaaaaatggaaagacgatattgaactaatcgactctttgggtgtagatgcttaccgtctttctatttcatggccaagagtcataaaattagatggcactttaaatcaagaaggtattaacttttacattaatattttagacgagttaatgcgtcgaaatattaaagcattcgtcactttataccactgggatttaccacagcatttagaggataaaggcggctggttaaatcgcgaaactgcttacgaatttgcgcattatgtagacctagtaagtcaggccttatcaggaaaagtctattcatacgcgaccttgaatgaacctttctgcagctcttatttaggctatgaaattggtgttcatgcccctgggatcaaaggccgagaatttggacgtaaagctgcccaccacttgctgcttgcacatggcttagctatgaaagtactaaataaaaatagcccagagtcacttaacggtatcgtacttaactttactccttgttatcctgtatcgtctagcgaagccgatttagctgcaacagcttttgctgatgactacataaaccaatggtatatgaaaccagtaatgcaaggagcttaccctgacattatcgaacagttgccagccgctcatagacctgacattctagctggcgatatggagattatttgccaaccattagacttcttgggcgttaacttttatacccgattacgttatgaagcaagtgacactgattattatcatgaactgcctcatcaagcgccaatgacagatatcggctgggagatatatccaccagcattgactgagttattagtctctttacatgaaaaatatgagttaccgccaatctatatcactgaaaatggcgctgcgatggctgacaaaatggtagatggagaggtaaacgatcaagaccgtgttgactattataatgcacacctaaatgctgtgaatgacgcaatactgcaaggcgtaaacatggctggctactttgcatggagcttaatggataatttcgagtgggcagaaggttattcaaaacgcttcggaattgttcatgttgattacgatacacaagtacgaacagtaaagctaagtggtaaagcatatagtcagttaatcacgcgccgataataagacaacaataatgataaaacacactcttcctatctacgaaaaaataggctacgcgatgggcgatgccggcgctaatttagtttggcgtggtgctttggcctatttagccgttttttatacagacacatttggtatttctgccgccgctgctgcgttactttttttagttgtgcgcttatcagatggcgtgacagatataataatggggatgattgcagatagaacgcaaacacgtttcggtaaatttcgtccttggatattgtggtcaactccttttctcgccttgtttatggtgttgtgcttcacaacacctgacataagcccagcagctaagctattttatgcttatttcacttatatagggctcactctagcttatacggtaagtaacgtaccctactctgctttaatgggggttatgactggtgatgacctagagcgaactaaactgtctggctttcgctttgccggagcatttgcaggtggcttattagttatgggctttttacctgatttagttgcatactttgggcaaggaaatagcgcacaaggttaccaatacactatgtatgtatttgcggccttactcactgtactcatgttaatcacgtttgtaagtacaaaggagcgcgttcaacctgcaacaaaaacgcaagtttcactaaaaactgagctaactgatttaagtaaaagcttaccttttatcattcttcctttattggcgatcacattatttttctattatcgcgagctctactccggtttgttttttgcggcaacaatgatttttatgactgtcgtaattcgtcgcttacttgcaagcgatcatagtaagctaagtggcactcaacgagatatggttgatttacttacaaataaaccatggctgatcttattaggtatgggctttttaacaatgatgtttaatggcattaaatatggtgtcattgcttattattttaaatattacgtaggtaatgagcttttaactggccaatactttatagctttattaatcgtctcaattttcggcgcgttaagtacaggaaaattagctgaaattctgggtaaacgtactttgtttatcgcttcattattactaagtgccttctttaccatttgtttcttttggctgccaaatgataacctcagcctgatctttgttatgggttgtctgtctgaattcttcgcagccatgatgcctaccctgttttttacgatgcttggggatagtgctgactattctgagtggaaaaataaacgccgtgccactggcctcatatactcagcaggaactttcgtgcaaaaaacggggggtggatttgccggagccttagtgcttgttgtacttgcaagttatggctatgacggaatggacgaaaccaccattgcacactcactcgatggcatgatactactaatgagttggctaccagctgcgtttgctctaatagccgcagcactgatggccttttatccattaacatctgaaatgacagaaaaaataacagaagacttggcaattaggcgtgcaagtctgtaaattaaacagttaaggtttatatcaaacagtaattatggcaactatttatcaggtatcagagctcgctggcgtttctttatcaaccgtatctcgggtgttaaatgaaaatgattacgtcagcaaaaaaaccaaacaaaaagtcctcgatgcgatggagcagctaggttacaaaccaaattcgatagcgcgctctcttgcttcaaattgcaccaatagtgtggggattttagtctctgagctagacggtgcattttttggtgaaatgatgtctgctattgaagcccaattaagggcagctggtaaacatgtcattattacgccaggacacagtgaagaagacaaagaaaaaagtggcttagaatttttaatttctcgtaactgtgatgcgatcatcgcccacgttgaagccgtaagtgatgaatatttagtaaaattaaataaaggtaaaaccccaatctatctaatcagtcgctatgtagaccaaatgaaagaaaactgcattagcctcgataacgtaatgggtggctatttagcgactaagcacttacttgagcaaggccataaacagattaattacatagcaggccctttattcaagccagatgcttataaccgacttgaaggccacaaaaaagcgctaaaagaatatggtattgcatttgacgagcagtctcttttcgtgggtgactttaaagaaacaggcggatacaaaggcttacagcatttcttcaacatcaataaagaatttacagctgttgtatgtgcaaatgatgaaatggcctcgggcgtaatgaaatgtgcaagagagcacaagcttgatcttcccaaagatctggcaatcatcggctttgataatgttcatttcacaaattatttatatccaactttgacgaccgttgataaccctgtcgaaaaaatgggtattatggccgcgaacttagtgttaaaacaggtgtataaacaaaatcgcgctaatatagagcatatatttacgccaaacttgttgatccgcgattcaacaacacgtttaaccagatcttaataaaaagcgaatacgatatcgcttgttaaaaagtaacgaacaaaattgctatagaaatggagaagcaggtgtttatcggtgaagtagccaaaaaaaccaatttatccgttaaaacaattcgcttttacgaagaaaaaggcctcataacaacccctcaacgtcaaggaaagtaccgtgtttatacaaatgaacacatagaggtattaaagctaatctcagaagcaaaattactgggggttacactcgctgagttgaagggctttataaagtatgaaaacgggcaagcaaactgggccgagattagagaatttttgttgcatcttaagagtcgtttgcaaacacaaattgagcagacaaaacaaaaaatcgcccatattgattcatgtgttggccttattaacatcaaatagttagttgactctccccttaagtggagagtttataatcgctgtaggttattgatttaatcaagctagatagcatacacagtgtgctttcaataaagtcgtttttatattttcaaaaattgggcctttaataacttcgatttcataccaattcgctctattaggtagcaatttagacaaattaaacctcgttgataacggggcaaagattactgatttagttgttctaaataagaaatcattaatgcaggtagcgacaggcttaatccctgaaaataattaagcgttcttacgaattaattaaggaagatcatggaaaagttagcaaccgacatttggatttttgatggtgaagcagtaacgttcttttttttaccttttacaacccgcatgactgttattaaactcgcgaatggcgatctatgggtacacagtcctatccacctgagcgatgccttaaagagccaaatagaccagttaggcccggttaaataccttatagctcctaatcacttacatcacttgtttttaccacaatggattgcagcatatcccgatgctaaaacttatggcactagtgaggtcataaaaaagcgcaatgatatctcttttgatgcatcccttaatgacgacttggactggcagtggcaggcagatatttcccaagagttatttacaggctcaccctttatggaagagtgtgtgtttttccataacaactcaaaaacattgattgtgactgatctgattgagaacttttctggtgacaacttcaaggcttggcaaaaatggctcgcaaaaggtgcggggatcttagctcctaacggaaaaacaccgatagattggcgcctcagctttatgtttaaaaagcctcaagctagacagcattttgaaaaaatattggcttgggagccggaagttatcattatggctcatggagaattaataaaacaccacgccatggggtttttacgtgagtcgtttagttggcttaataaaacctaactttattgcacctgttgaccactttataaaagcgtttatatcagtttagtaactgcacttacgggaatttcatcggaacgttgactgaacaaaatttcaaaattttttcagatatcgattgactctcccgttaaggggaggctttagagtagcaattatttcctaacacaaaggtcttgattgtgaaaaacatactcattttaaacggaaacccaaaacccaatagctttgctgactctttagtggatgcatatgaatgcacagctaaagaaacggcaaatatacgtacttttagactgtctgaaatggactttaacccagatctcagctttggttatgatcaggtacagccgttagagtcatgcttagaagcatttacaaatgcactcctttgggccgatcatctcgtgcttatttcgccagtttggtggggtagcctacccgctaaattaaaagggctgtttgatcgcgtttttttgcctggggttacctttacgtttgaacaaaatagtttacttccaacaccacttttaaccggcaaaactgcaagacttatcctaaccatggacaccccaaaggagctaatagatcaattagcacagcctattttagagcagttgggtcgacacacgcttgagttttgcggttttgcaccgccaaaagttaacttatttggctcagttatcttatcaagcgacaggcaaagatcggactggcagactactgtgggagaactgggttctcaatgtgactaaaggcttatgtttgttgtgtaaaatataatatattattatttctattaggcattgctgcaatgattgagcagtgcctaattagaagttagctggataggacgcatatggattatattaaagtaaatagagatacatggaataaaagaactgatcttcatacccagtctagtttttacaatataccaatgtttaaaaatgggagaaactcactcaaccccatcgagctcgccctactcccagatgtgaaagataaatcgctattgcacttacagtgtcattttggtcaagacacgctctcttgggcaaggcttggcgcgtgtgtaacgggtgttgatttgtcgcctactgcaattgagtatgccaatgagctcaaacaaaacttaaatttagaagccacttttatcgaaagtaatgtttacgattttgacgctatcaaccagcaactttttgatattgtttacacttcttatggtgttctaaattggttaccagatttaaatcgatgggctaaagtaattgctaactctttacaagctggcggcactttatgtctggttgaatttcactcttttaatgagttattaaatggctactcttattttcatgactctgaacctaccattgaagaagaaggaacatacaccgaaaattgtgatggtacaaagtcaaaaacagtaacctggagtcactcaattagtgacattataaactcactcattcaggctggtttgacgatagaatcattcgacgaatacccatatagcccttatgactgctttgaaggcttagagtatgttcatgataaaggttaccaattacttcacaaaggacatcaagttcctttagtgttttcgattaaagcaagaaaaggatgttaatttgacccatttaatttttgagtatggcaattcacttaattaagcaatctactctgaggcaataaaacctcgctaataacacggcaataatttcgttatttagtggttctaaataagaaactttaacgcagctagcgacacgttttatcccttaaaataattaagtattgcagattggtattattattttttgaggaagttatggatattaatttaatcagtatatttgtttcggttgcagctgcacactttcttgcattgctaagtcctgggcccgattttgttttggttgttaaaagtgcattaaaaggcaatcaaaagaatgcgattggcgtagcacttgggatcgcaacagctaatgcagtgtatattaccttatgcttaattggagttggcgccatattatccacctcaattggtttgatggtaacgctcaaagttattggtggcttatttttgatgtatatagcctatcacgccttaaaagcccctaaaaatgcctatgctaatttctccacaaataccaaggcatccactgaattttcattatcatgcttttgcaaagagtttgtaactgggtttctctcaggtattttaaaccctaaaaacttattattttatttaagcttgtttactgttgcactaacccctgaggtcagcattagctttaaagtgcttttaggagtatggatgacattagtcgtctttttttgggatgtggcaattatttatatgttgtcaaaaacgactatcagacaaaaattcattagagccgcattttatattgataaagtaacaggtgtcgttctcggtgcgatagggtttaacattctaaaatcagtttggtcaaaacagccgtaaatactactgcatagtaaggtgctgtttataacgcggtgttgtaaaacagcaccgatttatttaaatcagcttttttaattgcttactgtaggttcgacttacttttaaggttttacctgtagttaaggttgccatgtactctgagttgcgcaatggctcaagctgtcttacataggctaagttaataattgtcgacttatggatccgcaagaatgcctcaggcagcatattactctcgagttcctttaatcttgctcgcataacatgggtatcggtcgcggtgtgcacacacatataatcgccagccgcatcaatccaaagaatatcggtgaatgaaattatttgaatcgggtttttagcatcccggataaccaagtgatcactgtcaaaattataatcagactgattagcagagtgtttgttttgctcagacttgctactcacttcttgttgtagcgctatcaactcacttttttgaaatagctttactttacttataactctttcaatagcttcagcaagtctatctagttttaccggttttaataaataatcgatggctctaacttcaaaagcttggaccgcatgttgatgaaatgctgtgacaaagatgaccgcaggacatgcctctggttgaaaatgctttatcaattcaaaacctgatttagagggcatttcgatgtctaagaaaattaaatctatttctttgttatttatcagctcaattgcatcgtcaacactgcatgcactaccaacaatattaatttcaggaaaatgttcgagtcgaatacgtaaaccttcgacggcgctgtattcatcatcaaccagtatcgtatttagttttatcatttattatgaccactcataggtaatgttatacatacccaagcaccaccttcgcttaagttgcccttttctatacggtgtgactttccatacattagctttaaacgttgctcacaattagctaacccgatacctcttttgttggtactttcctcaccaaatcccttgccagtatcagacacttttatatttaaataactcttcgttttttctattgcaatggtgatacacattttctggtttgaacacatgccatgctttaaagcattttcgacaaggggttgaatcaacatagaggggatcaacaactcgttgcaaccatcggcaacagaaatatcaacaactagcttatcagtaaatcgacacttttctatatctaaataattgctaagaatgccaatttcttccttaattgttaccttctcaagtggatctgtatataagctgtggcgcaatagatcacacagtttttcgagcattttgacagcttctaaactttctttcttcaaaatcaatgtacaaatcgcatttatactattgaacataaagtggggattaagctgataacgcagcatttttaattgtgactcttttgctaggtgtgtggcttcagctgctttttgcgtttgctctaagttatctaaataaatcttgatcccataataaaacgcggcccatgttgaaagcactgttaatgacgccgacgtccatgtaccaaagtcaaaccacgtcattggttgccaaaagtttccataaaaccactgcagcgtaatccactttatttgtgtccaaattaacgtcgcagttataacaacgacaacatgaagcgcaatcttcagttttagctcaataaaattgatataggagaatacttttcgcaggaacagggtaattaaaaagccgcagattgtatcaataatcagatgcgggatatggatagtccaaggctcatcacttggtactttaatcattaattcggttagcattgcgtaaacaacccaaccacatatctgaaacagccaaaataagtggctgcgggggttactagtattcaaattattcaatccataaggtaaagctgatgggcattacttgctcatcagctttactaagatttagtcagagcatgagagtaaataagcatctgtatttggtttactagtcagtgctatatccgcaacagctaagctggcagcatttgctgaaacgtttagcacctctgtcaccttggtcatagtatttaacgcagatggacaatttaacggtatcgctaacgtatgccatttcttatcattcatcaaggcttctattgattcaaacttaatgttacgcatgcaatggttattgttacacattaattgtatttgagtcgctttacttggcgctgtgttaactctcattttaagttcaagaatagctgacttacttgcatcactgagcacttcaggctgcttatagcttaagctcaaagtagctttctttgcgcctgctcgccaaatgaattgtcttgcatcttcctgataagacaagttaactgattgcattaacaaactagcaccatcaccactggttgcagatgaacctgttgtttcgatggcagcggtatttgcgtcttttaagcgccaaactaagttctctgctaagcctctaacaaacagtggctttgcgtcttcattagcttgctttttaggtgatgttttttcactcagtaaaggcacattaaccgtgtcttggtaggttaatccgtagtcgtaagcaaacaatggatcatagttttcatcacctaagtttaatgtgtattgcgtgtcatactttggccatgaaaagctcaacttacctgaaaaatcatgttgaatgttgcccttcgaatcggtcaataaaacatctgctacgccctcgccttctgagccaggtaaccatgcagcaacaaatgcatcagatgcattgagttctttatttatccaaagtggtctaccgctcaaaaatacagtaacaaccgcaatgccgtctgcttttaactttttcaataatgctagatctgcttttgttttatgctgatattcaagatattcgatatcaccaaaccactctgcataaggttcttcgccaataacaacaattgctacatcaggtttgaccgagtagtttccggcttcgtttagttcaatttgcccaccggcattttcaacttgcttctttaaaccaccaaaaattgacgtcgcatttggaaagtcgtcattggtgttgtctgtgccttgccacgaaacactccatccacctgcttgctttgcaatactatcggcaccatcaccagcaaccagtatcttgcttgttgctttaattggcagtattttgtcattatttttcaataatactaatgatttacgaacagcttctctagcaagctcacggtgctcagcagcacctaaccattcaggatgctgagattcagatcggcttgatggtttacctcttgagaataagccccatctgatcttcgctcttaaaaaacgtcgaacagcatcattaattctttcttcagaaatagtaccctctttcacttgcgcaaccgtgttgtgataaaaggcttcaaagtgctctggaaccataataacatcaacacctgcattgatagctgcagcacattgctctaaatcacaaccctcaacaaatttgtgagcattccagtcactgacaacaaaaccatcaaagcccatttgctttttaagtacctctgttagcaagtatttatcaccgtgcacacgttgaccgttccagctattaaaagatgccataactgactgaacaccttcatttattgctgaaaaatagccaggactatgaatatctctcaaacctttttcatcaataatagtgttgccacggtctataccacgttcagttccaccatcaccaacaaagtgctttgctgttgcaatacgatttgttcctgttaagaaatcattgttgatgcttccctgaatacctacaaccatttcgcctgcgtaatctttaactagatcagggttctcagaataactctcatatgttctgccccaccgatcgtctctgaccactgcgacagtaggcgcaaaactccattctattccggttgcagcaacttcttttgctgtcgcttgaccaatgcgtttaattagctctttatctctggttgcacctaaacctatgttatgtggaaataacgtagctccataaacattgctatgtccatgcattgcatctgtgccccaaaccgtcggaattgcgcttccatctatcgatgcatctactgatgcctgatacatctcatcggcatattgaagccactgtttcatcgaggcacgtttattaccataaggcgcggtgttaccaccatttaagtacgacccaaagccatacttgcgcatctgttcgacacttaaatagcctatttcaggttgaaccatttgtgctactttttgctcaattgtcattccttcaatgagctcatcaatttgcttctcaacagcagggtcttgtttgagtttagtgtttacatcaggccagtttacctgttcgctgtcgatggcatgtgaaagatgactataaacaagcccaataagaaccaatgggcttaataataatggtgaaaatttaaatctagacatttaaaacctataatacaacacgttgaaaaataaatagttagttaggtatgtattcaataaaatcataatatacccaagatgaagcaccataatattgcccaggaaagtaattggcttcttgtgagttatcgccgtgccagtgattaatcataattttggtgttatcaacaggccaagcgtatgcaggtatctcattatttgccagcacaccatcaccattatctttataaacggtacgaatagtttgctcttggccattggcatcatacagataccaacgaataacactgctagaccaatcaaagcctatcatgagcagattttcacggtaatcaagcccaaattggcttaaatcgatgtcttgttcccagctttgatataaaccaccttgcggttgatagataatatttgtatgtacaacattaccaagtgagggcagcaattcaatgtctatttcttgccatgctcgacctggactatcccaccatgaggtataagtgaatatcgatgaaaccgtaccagcaacattgcctgactttaatcgaccttgtaccttgccataactataaaactgattgctctgtaattctgagcatgtgccttgcgataaggttagtgttaagccatgctcgctggggctttgcatattaggctcaaaggagcacccaaatggcgtgccattgtcaccttgtcgtgcagtccaaatactcgtgttgtatccccaagaaaagttatctttgaagtagtttgcacttaaattaggggataaaaaagcaacacataaagttgctagtggtagccataattttttcatttttttgcctcataatctggttagctctcatattgcagagcaatatgagagcgcttaatcgtaaggttaaaatgagaaaccggctctaacaccatagtatctcggcatgccaaaactaccttttggtacacctttactcgtgttgttccaatattgaatggtctcatcagaagcgttgttaatgaataactccgcataccatttttggctttgaggctcatacttcaaagatgcgttataaacggcgaatgcatctcggctatcatcaatatattttgtcgcttcgtctgaaactgcaaaatccatatcatctaaatgtttatcaagattccacaccgttgaatacgatttatctttccaacttgcgttaaaccaaccatgaataaagccatactcacctaaattgaacgtatgcgtataactaatattcgcagtgtatttaggtgtcattgctaggttgttacctttgaggtttgtcgctaacaatgtgttttctggatcttttgactcttcataagagatatcaaatagatactctgaatcataatcccacttagtattccaatcttccgtaattttagcatcagtccaagttacgtaacctgtaatgcgaccatttggatatggcttccagtcaaattcaaattcaatacctttaattgttgatgctggaacattctgagtgtaataagcaatcacaggttgattttgataatcaagaagaggctcgccatcatcacctaaaatcggtgttccgttatcatcttccacaactgataagcgttcaacattaccgatcgaaccaaccgatgcgtattgcatatctgtatagtctgtatagaaaaaagcagcttttaaattcagtgagttatcaaaaaagcttgatttagcccctagctcccacgttaatacttcttctggatcaaacttcgtttcaaaccgggtaacatcaccggttctatcgttaactacttcgtatacatcaccaataccacccgctttaaagccactcgctaaatatgcatacagcatggtttctgatgaaatgtcataatctaagccaacacggaagtcatgatgttgccagcttcctttgttgtcattttcaaagtaagatgcatatatagatgggtcttcgtaatagtcgactggcagattgtttaggtctgttctatttaaccaacctacagcacacccatcggcatttgagcatcgatacgttctgccgcctttgtcttgcttagtttcatcactaaaacgatagcctaaagttgcatgtaacttctcggttagcttgtatgttccttgaccaaaaatggcaaatgcatctgttgagcgatcaggttgatcccaaaacgctttatcatccattggattatcataataacccacagttgtggttttttcgtggaagtagtttgcccctacaatccatatgaagtcaccatattcatcagattgaagttgtaattctgttgaaaacgattcagccccagtgccgtttaaaaagtaggttgcaccatcccatgggtcaagacctacttcactgtcttgtgctgactctcttttcatgtcttcataacccatcaaccaaacgatattgtattcatcatttaggttataatttaatgtgttgcgaagataagtgatgtctaaatctaattgtccaggaacattcacaaccgcttgataagtgttgtcacttggcaagaaatttgagcaatcgccccccatttcagctggacgtcctcttaacttatcacagttaactaaatcaagattattgttgctgttatttacgtacttttggaaaaccgtatggtttgagaaattaccatttaatggctcccaaagtgtgctcacacggaatgaatattcatctgcattgttataaaaatcacttttatctgcaggtgttaatgcgcgaactttttgtgcttctggatcggtaccagcaccatcaatccaccagttttctctttgagtgacggtttgaccaacaccttgataagagtcttctgatattacaggtgcatttaatacatcatcagaaagcctgcgagtatcgtactggttaggatcatagtagccttctaaataagaatcacgcttcaaaccttttgctgcgaaacgaactgcaaattcctcgttaattggaatattaacaacgccatcaatgtttttgctgttgtacttacctgcctcaacattcacattgccaaagaaattttcaaattgtggctttgcagatataacattaatactaccaaccgtagaatttcggccgaataaggtgccttgaggaccacgtaatgcttcaacacggtcaatatcgtacatcaatgcaagcgcaccttgcattctcggtgaatacaccccatctaagtgcacaccaaccgctggatcacctagctctgttaggttggttgagcgtaccccgcgcattgaaataacgggtgctgattggtcggttgctgttgaaatatcaaggctaggaacaaggttcgcaatatccttaatattattaacaccattttttttaagctcagcttctgttaacgccgtaattgctaccggtgtttccatcaacttcgttttgcgttttgttgccgtaacagaaatgatttctaagccactttgcggctcttttgatactttattgtcaatatcctgctgattttcgttttgtgcatgtacaggtaatgagcaagctaaagcgacagcaactgctaatgcctttttatttattgtgtgcatattcaacctttagatgtgtgttcaaatttaaaagtatttacttttaattaacagtatctgcaggttcatttttcattaccagtcaaattcggcaagacgagtttgaaataatacaaagcgaatttaaagttacttttacgttggattttacgtactttttgagcacagaccacaaggaaataaaggggctttaaactgttcagatttagtttaaagccaccatcatcaatgtctatttaaggtgatcggatattaatttttctgtatgagagagcaactcatatccgcctacatcaccatgcccgggaacaaccatcactgcgcttttaaattgtttgtttaattgctttgttatatttagccaagaatgaatgtcgccatgaactaagttaccaacagatgatgactgaagtgatcgaaccgcacaaccaccaaataaaattcttttttcaggtaaccataccataacattgtccattgcatgcccggcccctggataaaacagctcaagtgagccaaatttaacaactgagcctgcttctttaagctctttaatggtattgtttggcactgccgctccttgctctgtcgttagctgaacagttaatggatgggcaaaaacatcgatccccttagattcaagtacatcaactcctgcagctcggtcgccgtgggcatgtgtaacaaatgctttgcttactggcagtttaatttcagagtgtattgcttcgagaagatctaaagtgagtaactctccccacgcagtgtcgataagtgtcaaactatctccttctttaacaattaagccatttgaaggaaatcgtgtaccatttgggtaagtataataagatgtatgtagccacaccccttcatctagcgcagtgatagtgacttgattaggcttgctatcttgcgctgcaccatgaaaactacatattaaaagaaaaaaaacaaaataaccgagcatcctaaatttcatcatcgctctatatatccctaaattaagaccaaaaaaataaattataataaaaactaccaacaggtaggaatataattatgaagcacaatttatttgtaagtctataagaagtagtactattttttagtgatatagaaagcgagtatgagaattagtcagttatagcttttacgatgttcgctaactaattctcttcagtgtgattgaagaaagtggcaatagtggctctttgcgccataaacataacaccataaatcatggtatgtggcttcaaggtttaactactcagacttatctaaatgttcactttttagaggtaacatacgttttaaagtgttatcagccaaaaagtaatggtgaactaatgcggcagcggcatgtatacctattaagtagtagccaacttcacccactgtctcgtgtaattctttaatcgttttagcaaggtctttattttcacttgctaatggaggaagctctaagccaaaaaatggcacgggtttaccagccatactcaatatcagccaacctgctattggcattgcaatcatgaagacatagagcgcaaggtgcactagtttagccaatgtattttgccactttgcaggctcaggttttatcgctggcgttgagcctgccagtacacgcactactaaccttatacttactagggctaaaacagataaacccaacataaaatgccacattttaaaagcgtcgcgggtttctgtacctttatcaaataactcgcgcaattcaatactgccaaaaacagtgacgattaaaataaacataagccagtgcaatacaatagaaaaagtattgtaatgagtcgttgtatttttaatattcataatgcctctttagtaaaaacgcctttagataagtgcccaatttatacgtaatatagactcacaattaagctatcctttgagcgctcatgctgtaatgatctaaaacaaaaatgagctatctaaaattatcttgtttacttattagcgaaactctactgtacttgtttaaacttaaaataaacttaagtcatttaattatataagcttactactctttatagccctcaagatccgccttacattatcgtgagcaatacccagtttattgccccaactgacaagcatatttccgaacacctctcaccatctacttctatttgagttcgtagaatttgaaataaaacttcctgagcattaccgtgaaaattacaatccggtttttcgattacaacaatccttttattccattttaaagattaaaaataatgagcaatactaaactcatcaaattatgagagttagggtattcaaaatgattaaaacagttacttttgcaataatgcacttcacaatcgcgtttacagtgacctactttttaacaggtagttttttaattggtggcttggttgccattgttgagcctgcggtcaatacggttgcgttttactttcacgaaaaggtgtggcgcaatctagagagtaaggatagcttcaaacaaaacccagatgggataatgtttgcataaaaattaggttgaattgactcgcaaagcaacgaataccccatcttacacttcgaactgtaaattaagctttgccactagagccggtggcagagctgcaaactaaactggctattgttgttaagctttatagccaaattcaaacacattctgtaaatgggctctacactcccacttccctgaataattacctacatgagctgaacctatcaagcatatccccatgaattaaaataaaaagcaactattcctaaagctctccttatcacattttaaattcttaaaagttgcatatagctccgtcaatttagagctaatactcaaattagacttgcaattatcacttttcgacttacacttgtgcgctaagtgagcgtacacctgtaagctaaaggcaaaaaatgagcgcgttatttaattcattatcaaaacacttattacatcatcaatcatgggctggatactgggaacctgtgatccagtgctttaaacctggctggcgcgaaggctactttcgtgcacaagtaaaacacgtacaagtgtttgctgagcaaaatgttgagctggttcttgaaccagaaaaagcatggccaattcatcaagcaggccagcatattgcgttaactatacaaacaaatggacgattgctaacgcgtgtatttactatagccagcgaaccacacatggcaaaacagcaaggtcaaattaggttactgatccgcagtcaagaggtaggcgcgtttacatcaaagctaactagtctgaagtctggacaatggcttaatatttctgagcctaaaggccagtttgttatgccaaatactgctcgctctttaattatgcttgccggtggttctggcattacgccatttatagctatgcttaaatctatacctgctgatagcaaaaaaaccataaccttgctttattacgcaaaaccaaacagccactggcttaaagatgagcttgagcaactaaaacaaacactgagcaattttgattaccacttacttgagcgcagcaaagatggcgatgcgacgacatggctgacaccaaatgcgcataaacactggttagtatgcggcccaacttctttgtataaccaagcagctactttagctgaacagttagatacacctataaatagtgagcatttcagtgcagtccctgctgttttagcaacctctgataagcacgaactaacactcactcatcagggcaaaacattcactattgataaccaacaaaccttactgacccacttacaagcgaataagcaaccggtgacagttggctgtggtatgggcatttgccatcaatgccagtgcgttaaaaagcaaggcatagtgcgtgatattcgtaccggtgagctctctgatagctcagagcaattaattcaactttgcatatcgcaaccagtcagtgacgtggagttatcagcatgaagacaacaaaaacagtcaattttgaaaaattagcagctcaactcgatagcgttaaagcagatgtaaaatcaaggctcggtgagcaagatgcaaaatatattcgccgcgttattgtttgccagcgagtgtttgaatggagtggccgaattttattaatgctaggctttattcagccagttttatggctcgtgggtgtgcttagtttagccacagcaaaaatcctcgataacatggaaattggccacaatgtgatgcatggccaatacgactggatgaatgataaatacataaattcaaagtcttacgagtgggatatagcgtgcgatggagctagttggaaccgcgttcacaactacgagcaccacacctataccaatattattggtaaagatcgcgacttcggttatggattactgcgcttatcgaatgactttcgttggcgggtaaaaaacctgtggcaatttgtcacttacctattactcagtgtgctgttccaatggggtgtgtcgtaccatgaaatggcagccgagcgagtattttttggcaagaaaaaagatgaccgcgattacaaagtaccgcacagcgaacttaaaaagcgcttttttagtaaaggtgcacgccagctagtgaaagactacctgctctttccattgcttgctgggcctttatttttgtgggttttcacaggtaacctagcggctaatttattacgtaacctgtggacctcaaccattatcttttgcgggcactttaccggtgaagttgaaacatttaaccagcaagactgcgaaaatgaatcgcaaggccaatggtattatcgccaagcgttgggctcatcaaatatcaaagggggtaacctgtttcatgtaatgactgggcacttgagctatcaaatagagcaccacttattcccagacttaccagcaaagcgctaccgcgaaatagccccaaaggtgcaagctatctttaaagagcacggtattcactacaataccggcggcttctttcgccagtacttttctgtagtaaaacgaattgtacgctactcttttccgtaaataatgaacgccagtgcaaagtactggcgttaaatctcattcgattcagaccaaacccgtaactcatcaagaatatgcagtgctgagcggccaaagtcagtaagctcataggtcaccgctatcggacgcgtactaataacatgacgggtgatcatcgctctactttcaagctcttttagacgttggtcgatcatttttttacttgcaccacccagcatgcgcgttaaatcattaaagcgcacagggccatcttttaaatgatagataatagagcccgtccatttaccgccaatcaaacgcatgcctttttcaatagcacacggctccatgcaagcatttaaaactttttttctacccttactatctgtttctactgaactttccaaaacatcctcgcatttttcagcctagttacaaaaaggtaactggttgattaaataatctaggttactattatataccacagaatgtattttgaacacgataaagtaactagcaaacggatactcaactatgaaaaacgtattaattcttaacgcacatcactattaccctttttctgaaggtaagttaaatgctgctttaatcgaaaaagccgacgctttttttcaagcaaaaggctatcaaactcgggtggttaatacacaagacgaatttgatgtagaaactgaacttgagaaccatcaatgggcagatatcgtctttttgcaatcacctattaattggatgggcatgacttggtcattcaaaaaatacatggatgaagtgtacaccgcgggcatgggtggagcgctttgccatggtgatggtcgtcatcaagacaatccaaaagccaattacggtaaaggcggcaccttgaataacactcaatacatgatgtcgctgactttaaatgcacctgcagaatcatttgcagatgccactgacttttttgaaggtaaaagtgttgatgaccttgttttcccaatgcatatgaactttaagtttttcggtatgcaagggttacctactttcgcctgttttgacgtgatgaaaaatgcagacattgacagcgactttgcgcgctttgaaaaacacttaaacgagaacttttaaggagcactcatgagtaacgaatctgtttatagcaataaactccatccgggcagtgcatttcctagtattagtgctgcacttttgaatggtgaagaggctgttcttggtcaacctcaacacggtgcaagctggcagcttgttgttgtttatcgaggtaagcattgccctttatgtactcgctatttaaacagcctcgagcagtacaaagctgcgctattagaaacgggtgttgatgtaattgctgtttcaggtgatagcaaagagcagttagaagcgcatttagaacagttatctgtgtcatttccacttgcttacggtttgactacagagcaaatgcaaacattaggtacttacatatctgatccccgttcaccgcaagaaacagatcaccctttcgcagagcctgctctgtttgtggttaacgagcaaggtaatgtacatgtggttgattattctaataacccatttgtaagacctgatttagcaaccttggtaagtgggcttagctggatacgcgacccaaaaaataactatccaattcgcggtatgcataagtagagagtagccatgagcaaatttacaactttgctgattggcttggtgagcataatgatgtgctcaccacatgccttttcagcacaactcccccatgcacatattgcttcacctaatcactatgaagtattgctagataacagtgaagtacttgttttgcgtatgactttagcaccaggtgagcaagataattggcataagcataatgctgaaactgtctattttgagacgggtggtaaggcaaccatcagtactaaagagtcacaaacaacacttgagatccccaatggctatgtgatgtggcatgacgcatggactcatcaagtcaaaaatgagggtgaaaccaccatcactgcaattattgtcgaaaggaaatagataggatcaattatggcattagaaaaccacccaatgtggcgcttacctaagcatcacctagatttaaaaagttcacatgaccatgttcattgggttgaattattttatgatcttatccatgtggtaatcatttttctgctaggtaattttttaagcgaccacttacatttaagtggttttcttacttttgcaggtttattcatcaccgtatggttcgcgtgggctgactccagcgtttttaactcactctatgtcagtaccgatgtaaaacatcggctgataatggcctgccaaattgtcacagccatggttatggcagcctctattccccatgtacttgacaaaggctggacatattttgcattggcctatgcagctaaccgacttattacagcgtatctatttcatcgcaccaatcaattggggatcgaatcaactaaattagcacgcagtgtgagccgtaactactttgcacttgccattatctttgcgaccacagcttttatgcctgcaccctatcgttattgggtatttggcactgcgattgccgctatccaagttttgtatatggctccaaaaattggtgtacttgaaaataaacgttttttaccacgccttgggcatatgtctgagcgctttgcccttttactgctcattgtcgtaggcgaaggtttctttaaattggtgattactttatcagaaaaaggaatttataaagtcgacccctctgtactggctaactttatgtttggcggtattgcagtatttgttcaatgctggatttactttgactttgttggcaatggtaaacctaagaatcaacataaatggacactcgtaagttggtggttagcacacctatttttaatgttatgtgcagttatggtcggcgttgcgctcgccggcgaagtgaaagctgggttttggcaaccttacccacttaaatatggtgtcattggctgtgtagggttagcaggctacttattgagtttattgtggatccagttaataatcgaacaccgtgtagcccatcgttttgcaacagctaaagtaagaatgtttggcgttatactcgctttagttaccattcccattttaccccatgtgccttcgctcattggcaacttactttggggcacagcactgatttcacaaattgcctaccctgtcactcgcgcatactttacactttcaaaagaagaagctaattcataacgattaaaacacctttgcaaaaacgacaaaggtgttttgttatccctgctgtttttcgtaaagactttcctagcaataatatcgctattcaatcgcccctctttaggggttgaaacaagcattaacggactcatgtcataactaaaggcaatgaaaaatgccggtgtgaatcacattggcctgcactttagacgtaacgaattacccatcgaatgggcattaaagcacatcggcgaatatgttttgcccaagttccataattaaggagttatgatgtcacaatcaattatgccaaaactgggttttggtacatttagattacaagacgaagttgcatatcaaagtgtgctaacagctattgaaaagggctttagacacatcgacaccgcgcaaatttacggtaacgaagaagctgttggccgagcgattaaagacagtggtgttgcacgtggtgagttatttattaccaccaaagtatggaatgataagttaaataaaacggactttattaacagcgtaaaagaaagcctgactaagctccaactagattacatcgacttactgcttattcattggccaagcccagccaatggcgaaagcatggatgagtacttaaccgagttacaatcagcaaaagagcttggtttaacgaaaaaaattggtgtttcaaactttaccattgcacaaatggaagaagccttaaatattttgccaaaaggcgcgttatttaccaatcaagtagaagtacatccctacctaaccaaccaaaaggtacgtgatttttgtgcgcaaaacgacattctcgttaccggctatatgccatttgcggtaggtaaagtacttaaagatccaaccattaaagcgattgcagacaaacaccaagtgagcaccgctgaagtggtcattgcttgggaattagcgcatgacatggtgacgataccgtcatcgaccaaacgcgaaaatatggctaccaacttaaaagccctttcgcttagcttaagccaagacgagattaatcaaattaatgcccttagctgcggcgacaggcaagcaaacccggattttgctcctgaatgggatcatgatgaagtaaaaacaactcaagcttggcaatttcaaggggctgataaagcactcgctttgggattaaaagctgtaccagcacttaaagcagggcaaattttagtccgcaaccttgcaattggtatcaatccagttgattggaagtttattcaagccaatcctattaattggccagatgcacacacgccaggcgtagacggtgcaggggttattgagaaggtaggcgatggcgtcgatagcaaactaattggtaaaacagtcgcttatcatcatagcttaagtgaaaacggcagctttgctaagcactcggtgctttatgctgaacgtgttatgcaggtaccaaaagagttagctgctaatgttgctgatgcattgccttgcccactgcttactgcgtggcaagcctttagcaaaataccattacgcaaaggcgaaaaagtattagttaccggcatgggggctgttaataaactactgacgcaaatgctgaaccacagtggctttgaagttcatgcattatcaacaagcttaacgacagaacaagctgaaaaacttggcgttaagttagtattacgcgacgcgccttctgaaggtggctactttgcactctttgatgctaatggccctgaagaagctaaaaggttagtgccactcctaaaagcaaatggccatgtgatcagtatattaggacgtattgaaacacctgtagatgagccatttacgcgcactatttcttatcacgagattgcccttggtgcattacatgattatggcgatacacagcaatggcaacgccttgtgagcgatggagaaaagctccttaatgacattgcttcgggtagtttaaatgttgaagaacctactgactttgaatttaacaatctcaacgatgcgcttgagttttctagaattcaaaagcaaaaagccgttgtcgttgtttagttctcattttaaaggcctctaatgaggccttattattttattctgctgtttgattaggtgttttattaattacagctaagtgatagataatcactaagttcgcaataaaccacagatctttaatcacaaattgaccaagtccagctaaaacggttgtactgctaagcgcattcggtgcggtaattaaaaatgtttgtgtcatgataaaaacagcactgcaggcaagcccagctaacactattagtttgttgttcttaattaacaagccaacacaaagcaacagcacactgacaatatcaaacacgccaatcacattcgatgcaccctgcacactaaaaacctgatataaccacgacataaacggcgatgtttctacaaggctcacaattcccttcgcttcaaaagcaaaaaacttcatggcgccaatccaaaccagcactaatgccaccgatgcataattcagagcaatatgcgctttatcagttaaagcatctttgtaaaacacaaatataaacagtggaataacagcaaaatacttaatgatcccctgccccgaaccaatcacagggaagcccccttcactagcaagccaacgattagcgccaaacagagttattaaacataccagtgagatagcaagtgcggtgacagtcggaagcgctttattaataaaccccaaatgtgaatgaaggctggtaatgccaacaaaacaaaatgcaaagcctgctatcatactcattaaatgagcaggcacctgagcgtctaaaccataaaacgaaaatatactgccaatggcattagggtttgcccctaagataaaagacaagcccaataacgaaaaactgatagtgataagtgcaaccactaaattatttgctgtacgtaaattcatttaacccccactttactgcttatttaaaagacccaagttagggataaaaacattcacactaaaatcaaatataagaaaagccagaccggaactatttataagaaattgaaaaataaataaaatcattactgctatttgctgttatttagttaaaaattaatctccttaattcaatatcagcaattttgttcaagtttttaggttgcctgcttcgctatattggcgtaggaataataacgaagcgcacaaccttcaggagcatctgtgagcaaagacaatcactttaagtacatcaacaacgaacagcatcaaagcatctcgatgttaactgcgactatgagtgattttacctatgcaaagcatgctcacgaagagtattcaattggcattactctacaggggcggcaagatttcttttgtcgtaatgcgttttataaaagcgtacctggcaatgtcattttgtttaatcctgaagatattcacgatggtcactctggcactgagcaaaacctagagtatctaatgctgtacattcatcccgatgaatttcagccgttgttcaaagcgcttgggtataaggaagattgcacattacgtatggcaaacaccttgtatgctgatccattactgcgtaatcaagtgattaacttatcgaggcttttacaaaccaatagcaccagcaaaatagagcgagaagctgcgctattgcaaatggcgcagtctttagtaaggctcaatggcagccttgatttgccaactttaaacacccgtgttgatagcttactactgcgcgcaaaagactacattttggcaaatatcgacaatgacattgctattgatgacattgcccatgctgccactatgtctaagtttcattttatccgccgctttcgcgagcacttcggtattactccacatcaatatgttttgaactgtcgtattaattatgcccgtagagcgttacaagttggccgcgatgccaccagcgtagcggttgaatctggctttgcagatgccagccacctcaatcgtaacttcaaacgagtattcggtatgacaccaaaacaatttcaactgcaatgggctcgtagatagagctaaattactgatttggagctgttatggcagatatctttgcatatgctattggcattatgtacacccctgggccaatcaatttacttggtttaggcagcggcttaaataaacaaactcgttcacaccttggattttttatcggtgtgggtagcgcgatgtttatcttatttgtactgcttggctaccttggcttacaagtgatcaatccgcagtttttgccttatgtgagcttaattggttgcggctatattttgtacattgcttggaaggttgcaaaagcaaaagtacaggtgagtgatacgtctgctgatgcatcacttagctttttcgatggcctgtttatgcagctattaaatccaaaagccttggtggctactctgccaattgctacgattcagttcccaagtgcagatattaccggcgctgcaatcgtattttggtctcttattttagccattcttgcctttggtgcgcctacaagttactcgttagcgggcttggtgcttggcaaacaagtatcacggccgggtatttttaatgtgtttaataaactgatggctgttttgttggtttatgtcgcgctaatgattgcctacgagcatgtgctaaccccgttaatggcctataaaattgatcatccctagcaaacaggcataatagcgttattcagcaaatggttatcacaaaacgatgcaaggcaacctatctatccgctcatacagtactaagcctgttagtcatagccatgactatcatcaacttgtactgcccttaaaaggtgtgattgctattagtgtgggtgattttcaaggtaaagtcgcccccggtgaatgcgtagttgtcaaagcctcgcaaacacacctgtttaccgcaatgccagaggcacgatttgtggtggccgatatgccaacgctaccggataacctggccactgctgagcgctgcgtgtttgctattaatcaatcactttgggcatttttgcagtttgtagcaaagcaacttgagcaagcggttaatcgtgaattagaacttgccatgtttaacaccttcaatttgctactaactgagcaaattatgcagccaaaggtcgacagccgaattagtgaggccttgctttatattgacagtcacctaagcactcctcttcatatcaaacaccttgccagcattgcctgtttgagcccaacacaatttaaactgctgtttaagcaacaaacgggattgactgtcatgcactatgtaactaaacaacgaatggaaaaaacccaagccttgctaagtcataccgactacccgctacaacgtattagtgagttagttggttacaatgatctttcatcttttagccgcagtttttcaaagttctttggtttatcaccgagcaaattcaacaaataactttagttttaaacgccaacaaaaccgtcctttttgtcaaaaattgtgcatcgattttgattatgctttttatatcttaaatttaaagcgaatcatcaatgaaccataccatcgcgaccattgccgttttagttgccagtgtgttttggggcacaacaggcacggccgcaagctttgcaccagacattagcccttttgcaataggtgcgtttgcgatgggggttggcggcgtattactttgtttaacctcactaaaacagctaataaacaatgcgagtacactacgtaagcactacagcctaaccttgctcggctcggcttgtgtggctatttatccgctggcattttatacctctatgaatagtgctggtgtggcaattggtactgttgtttcgattgccagcgcgcctttatttaccgtcttattggaatacttaattgagaaaaagcccattgcaactcgctggctagtcagcttttgctttggtgcaataggcattggcttaatcgcgttaggtaaagagcataaccttgctgctaaggggctgtttagccaaaacatcggcattttacttggcttaattgcagggcttacctatgcaggttattcatgggttgccaaacgtttaattagcagcggcgttcattcaagagcgactatggcaagcctatttggcggcgcagcatgtgtgcttttgccttcgttattgatcactggagatgcgctttttgcctcagttaccaacacctgcgtggcgctttacatggccatagtaccgatgtttttaggttattggctatttagtattggcttaaaaaccatcgcggctagccaagccgtgctcattactttacttgagcctatcatcgccaccatactggctattgtgattttaaatgagcaatttcagcaaattggctggcttggaattggcttagtgagcgttagcttgataattcaaacggtcaattttaaacgaatattagtgcgctactcgaaacgtttacttataccctgaattaaaataattagagaggaaactcaaaaggacaatgtcttgataatatagattaaatgtatgcgctaagtcagtttaaactcacttagcgcatgtttactttaggctgttttaaaaggattacgcgtatcttggttagcatcaagattgcgcatcaaaattgcgtgatctaaatcgatatcttctggcagaggaattttaacaatatggcctgagccttttgcatcgctaatggcttcgccttttttgttttccataaaatctagcttgaagttgatattcccttttggcgtcataagctcgagtgagtgaccagtacagaatttattttttacatcaatttcaactaagccattatcgttgcggcctaatacctcacccacaaactgctgtttatctgataccgaatgaccgtactcatagttttgatagtcttgatgtgcatggcgttttaaaaacccttcggtataaccacggtgtgctaagttttcgagagttttaaataagtttgcatcaaatgggcgaccagcaaccgcatcatctatggctttacgatatacttgcgcagtacgagcaacatagtagaaagacttagttcggccttcaatttttaaactatgcacgcccatttttgtaagctgatcaacatattgaactgcacgtaagtcttttgagttcataatgtaagtaccatgctcgtcttcaaaagcaggcatgtactcgccaggacggccttgctcttcaagcataaatacttcgttacttggtgcaccatcaccaagtgttgggatcaccgctttagggtcgattttatgcaccatttcgccggtttcattttcggtgccgggtttcacatcgtaattccaacgacatgcattagtgcaagtgccttggtttggatcgcgtttattaatataacctgataacaaacaacggccagagtacgccatacatagtgcaccgtgaacaaacacttcaagttctgtatttgggcatagttcacgaatttcagcgatttcttcaagcgataattcacgcgataaaataactcgctcaataccctgctgagcccaaaagttcactgtggcatagtttactgcattcgcttgcacagataagtgaatcggcatgtctggccacttttcacgcaccaacatgataagcccaggatcagacatgatcagtgcatcaggctgcatcgcaatgactggctcaatatcgcgtaggtacgatttaactttggcattgtgaggagcaatgttcgacaccacatacaattttttattttgcgcgtgcgcttcgttaataccgatttgcaggttatctaggtcaaactcattgtttcgaacacgaagactataacgaggttgcccagcgtaaacagcatctgcaccataggcaaaggcataacgcatattctttaaactacctgcaggtgataacaactcaggcgtaaaaggacgaggggtcaaaataggtgacgacatgaaagctccatacatcgaaccgagtacaagtcggttgcatgaattaatacgataatgaagcgcgggagtataataatctgcccagtaattttattgatctagatcatgattcaataaaactcagcagcacggttataccaatacgcttaattaagggagctcttttgaagcaataaaaccttgttagcgacaggtttgatgcttcaaaatctttaagtattattgcggattggtaccacatagcatgcatatgtataaatgatgtctaaagcaaaaagtgaccgtaagatggtcacctttatagcaaagtcgactgacaagctattctcattaaagttatcgccttaaactcctgataaacgctctctgcgctttttccaaagtaaaaactgatagccaagtaaaccgtcagcttgcatattaatacgcccccctgcggctttttcaattttcaactcagcgggcttgcctgcttgctgaaactcaaatagataaaagcgcgtagtttgtttatttaagtgaatagcgagctgttgccgagagtcattataaaagcttattaggctattattctcaaattgatacctaacatttttatttgtcgctattaacttagtcataagtttggcgaagctgtcattccaatttgctgactttttcgcatattctatcgatgccggcgcatctaattcccatacagtcattaattcgctgggaaattcacttttatcttgatagttatctgttgttgggtttgattgtgcccatccattaaaagaagtaaagcttaacaacaaggcggcagcatagagtgggattcttttaaacattgaaaactctttgatactgtaaaaattaaaataaagacccacttttcagtgggtcttatgcgcttaacaaaataaacgattagtcatctaagtgcgcgcagcgaccaaattcagcacctagtttaactgcctcaaccacttgcttagggaagctaagctcacggtcgcggccgttatcacatacaaatgctttattggcatcaatttcgattgacagtgttaatccagccacaccagccataatctcagagccattcgcacttaaaccaaacatgttatcggttaagataccttttgcttcggttacgccttgtttaccaaagaactcttctgttgacatccaaccaatacctttaaggtaaatagcgccaacaaaaccgcctgctaatgggctaccagcacgacccgtaattactgacaagtcgtcgtttgcatcaagtaccataactgaaggtaagccaaaacctaattcaactaactcttcatggctgtagcctaggtcacagtaattagtccaaaagcttaccgctggaatgttgtcacaccaacgcaggctaccaatttgctctgtggtatttgatactgtgtcccaaactttaacgccaacagcacgacggttttcaattgcaccaaacgcaacatagcgaccatcaacagaaataactgagttatcaatcgcaccaaactcggtatgagtatcaacaagttcaccatttacccaagcaatttgggtaaagccatttgtagaacctgtaatagtcttaccattgcctgatatacggtcagctcgagcccatgctgtacgacggatctcggtatcaccatctactagagcgatttctttacctgaaccatacgaacggtcaaccatcttagtacctggtaacagtgttgccttacctgttttaacatcccatactgttggcataccgacagaacgagcgccttcaccttctgcacagcggttagttccgtcataagggaagcgtgtattacctacgacaagtttacccgcatcatccatatcccaaacactttgcgagctaaaaccttgctggctagataacgcacagctattacccgtcaagtcttcaagcattgatacgtggcctgagttaatatcccagataccgccttgcataattccgttgtcattaaaatgtgcggtgattgctgctttagttgcagttttattcatcgcagtatttgtagagctcagtaatgcgtatccatcagggctaactaatgtgtcaaatgacttagtcgcgctgtcatataaaaatgggatacctgatgacgttgttcctagcgccttcttaccatttttcgcgtggtccataacaaatgctgaaataagtggtgtatattggataccgtcttgataaccgttaaagatcatctcaacttgctttgtctcgcctgctgaaacaacaatttcagttaaagcacacgcattatcagtacttgggtccgcactttcattttcattccaatactctgcttctgacaaaatatttgtttgctgagttgggtagccgccagcattaatctcttgggtataaagtgcataacgcgcacccggagttaaaccattaatagtaaatgatccatcaggtccaatacgaccttgagtcatattacctgactgctgactgatcacatcttcataaggattatcaagatttcgagctatcaagttaatacctgagtactcaacgccttcttttgtaaaaagcttgccttgaatgctaccaaactgtgatttgtactcggctgttgggtaaagatcagagatgtttacaatatcgtcttttacattaatggtatgctgattagaacctgcgcttgagcgaacattaataaacgggaacattgtttcaatcgctgagaaatctagcatacttgagctggtaaacttagttacaccagcacaaccaggcacaccatcgtattgcggactatagcttgccgacatatacactaaatgaccatttgcttgagagtgagacatattaatcgcatgaccgaactcatgggtaaataccccacctacttgcgtgccgtcagtatcgttaatatcaacataccagccattcatcaacgcagtggcttctaatatttcacctgtttcttcatcagcccattctgggaatgcaataccaagcactgaattgcgaggcacaccaaaatagttttctaaaattccaccgtcggtgtcgtagttaacccaaaaaccatagccgttttcaacgccataaatttggtctacattttcagctgttacatcagcaatgccggttttttcaaagattgtgccttgaatagacatctcaaatgttgatgtttcaacatcagaccactcttttacagcgttcgctgtcactgcatttgcttgctcaactgttaaaaaagtatagtcacggtcgagctctgtattcgctgggatcacagtgccatcaggtaaggtaacatcaatgttaaatacggtacctttttcaagcacactaaatgtttcaacatcattaccatctttgtctttgatcagctgaccaccatcggtccaaacaggaatactgccatttgaagtatcccatttgtaaggctgcatagtttgttcatgaatatacaaagggccgccagctaatgcaccggttgatactgttgctagcgctaatgctgctgcgattcttgaaaatttcattattgttgcactccagatagtttacccactaaatccataaaaacacctacatcaaccgcacctggtgtggttaaaaggttctgttgttcagctgacaacttactggtgtctaacccttcaaaaacgccttgattagcaaaaatattttctaccttaccgttacgtacaacaaacttaccttgtgccagacctaccgtagtttgaaagcctgtaatagatgctggtttatacataaaagcaatcacttgctcgccttcgcgccatttagaaaatccctcaggtgtagcccctaagtaaactttgccattacccattgaacgaggcttaatcaaaccaaactggcgaaatgtataagttgagtcttcttttactttgccttttgcatcagacgaaacttcaatggtcacttcagtataagggcggttattatcaaaaccgtcagtaacactaactacgcgtcctgaaatgatgctttgtgattccaccgtcatctgttgcaaattttgttgttttaatttcattgcattcgctgctggcgaaagtgtcagcatcgtgcctaaagcaaaggccgaagcacatgacagcttggtaaacgcgctgcgtaatttcattgatatctccttcaattattagaattgttttctcagaactgaactttgcccatgacaaagaagcaatccgttactaatttatgactgaatagaagtcggaattcacgtaaaaccatgtagcgttttgtacactcaaatttaacatttgagttacattttgatgtaaggtgaattactaaccactaattaaagagtgatgcaaaaagtagagttaaaacactaattaataggagaaaataaaaaacaaaaggatgataaagaatagaaaacccagacttaaatgaacctaaaattaacaactgcacattaattgttaattatttgtttaagctaaataaagctaacttcagctttaaaatttgaatgccttaaaactaaaaaaacacctcgttattgcttagtaaatatcagtgaaaataatgtgctgattttgcacttcaggcctgacattgagcatagagttcgcaaaacatctttatctacatcagcgacattaaaggtaagagtatcgagtacaaactatgccccaattactttggtatcattaacttaccatacgattattggttgactgcatgacttctctagggaaaatttatacattcataaaaatgccatcacgctaatgtttaattaaattaggaattttcacgtaaagcgcgtataattcgcgcccgttaatatttatccttttatattcaaaattattggagcataaagatggctttagagcgtactttttcaatcgtaaaacctgatgcagttgctaaaaaccacatcggtgcaatctacaaccgtttcgaaactgcgggtcttaaaattgttgcagctaaaatggttcacctttcaaaagagaaagctgaaggtttctacgctgagcacagcgagcgtcctttcttcggtgctttagttgagttcatgacatctggtccagtaatggttactgttcttgaaggtgagaacgcagtacttaaaaaccgtgaaatcatgggtgctactaaccctgctgaagcactagctggtactttacgtgctgactacgcagacagcatcgacgaaaatgctgttcacggttcagacgctgttgaatcagctgcacgtgaaatcgcatacttcttcgctgacgaagaaatctgcccacgtactcgttaatttcgagttcacagctaagtctgtgatgcagaagaaaaagggctttcgggcccttttttagtcattagctaagcctattgtaaatctgtttagctaatgactaagtcgattaaataatatacaatcgcgcaccaaaactacttaccaccgtcactgattgaggttgtttcatgaccactgaaaaaaagattaatttgttagatttaaaccgagacgcaatgcgtgagctattcgtatcgttcggtgaaaagccattccgtggcgatcaggtgatgaaatggatttatcattttggtgtagacaattttgacgatatgaccaacgtcaataaaaagcttaaagaaaaactaaaagctgaatgcgaaattgttgctccagaaatctctgttaagcaagtggcaagtgatggcaccatcaaatacgccctattgcttaaaggtggccaagaagtcgaagctgtttggatccctgaaaaagaccgtgcaactttatgtgtttcatcacaagttggttgtgctcttgaatgtacgttctgctctacagcacaacaaggctttaaccgtaacttatctgtgtctgagatcatcggtcaggtttggcgcgtagcaaaagacattggtttagacggtgacagcacaaaacgccctgtgactaacgtggtaatgatgggtatgggtgagcctctgcttaaccttaaaaacgtcgtacctgcgatggagcttatgatggacgattggggttttggtttatcaaaacgtcgcgttactttaagtacatctggcgtggtgcctgcgcttgacttattaaaagagaaaatcgacgtagcgctggctatctcactgcacgcaccaaacaatgagctgcgtgatgtactggtaccaatcaataaaaagtacccaatcgaagagtttttagcggcgtgccgtcgttatattgatggctctaaagcaaataaagatgtgactatcgaatacgttatgctgcaaggtgtgaacgacagcacagatcaagcacacgaattggttaaaacactaaaagggacgccttcaaaagtgaaccttattccgtttaacccattcccgggtaacgaatatggtcgctcaagtaacagccgcatcgaccgcttttcaaaagtactacaagcagcgggcattacctgtattgtgcgtcgtacacgcggtgatgatattgatgcagcttgtggccaattagtcggcgacgttgttgaccgcactaagcgtttagcgaagaagaaaatgcgcgaagataacgcaattgcggtaaatgttcaccaagcataatcacaatatttaaagtaaagcctttgtgctaaaccttttatttttaaaataatagatgcaacacaaaggcttttcggtaagataggcatacggaatcaaagaagagattaggtaatgcgatctatacttgccctaacagttagtacattggcattagcaggatgtgtcacagaaaatagctacgacggcagtaacagacccgttgttgaaaaagaaataaacaacagtggtgcggcgcgcacccgtatagcccttgctttacaatacttaaaaacaggcaataattctcaagctaagtacaacttagaacgtgctgccgattttgcacctgatattcccgaagttcattattctcttgcctattattatcaacaggttgatgaaccagaactcgccgataaagcctatcaacgcgcattaaaaattgctccaaatgatccaaacaccttaaataactatggtgtatttttatgtggtattggcgaatacgaccgtgccgctgaagaatttctaaaagcgatcgcaattcctagctatattcgagttgcagaaagttatgaaaatttagctttgtgcgcaattgagtttgatgactttgataatgcagaaaaatacttaaaatcagctttaaatcacagttcacaacgcgcttcctcgctgatcactctcgctggacttcattacgctaaaagtgatttacacaaagcagaaagcgttttagaaaagtacgaatcaacaggccgtgttaccccaagagcattaatgctcagttatttaattcaacagcgaatgggccacatcgagaaagctgaaaaaacagccgggatcattttacaaacttatccaggttcgagcgaagcaaagataatttcatcaggccaaaataaacgctcagaatttgaaattttacgcgaaaaatatcgtcaagctcagttagaagagctacaaatttcaagtgataacttagctgtgagtaaagagcagccaaaaattcgtatcgtaaagaaaaaagtaccgcaaacaaaggcgcgaacaggtcaaagcacggctctgtctgctgaatctaactcaaaaccagctgcgcaagcgctagcaacaacatcaagtaatgatcaacaagcatacgatattgaaccatcaacaattgaagaaaataaaagccagcagacagctgcaaagattgaaactgaaaataccggctttaaaacagttacttcaacaccaaaaaatagtaaccaagctgtcgatacgtcagccgtagtaagcgcgctatctgttgacgttaccccacagaccactgcctcagtcagcttaccaaatactaaaaatgatgacgtgacgattgtctcgtttggtgaaccacaatctgcttataagccagagccctcggtttcatcaaatcaagtcgaagcggacagttcaggcagtgtggtattttacgaagcacaaaaggatgaaagcgtatttagtaccgactctgggttttcatctacatcaagccaacctagctataatgtgagtgcagagcaagtgcaacttcccatgctaaacccaagtgtacctgcgctgaatattccctaccatattattcaaaatggcgaaaacctatttagcatttcggtgcgatacaatgttaaactacagcagattttgcagtggaatggcttcaaagaatcggatcgggtcgaaaacggcaccaaagtgtatttaaatgatccgaacatttatcacacgatcactgaaggtgatacgttgtacagcatagccacccagcatggcgtgttaattgatcaattaatgcgctggaataaattgagcccagacgttgcccttgaacctgggcatagactcttattagtggaccctgactcatactcattatgaatgaagaaaataacctagaacaaccgcaagaaacgctcggccaagcgctaaaaaagcgccgcgaagaagcaggaatgagccttgagcaacttgccagtgcattaaaactatccgttttacagctgcaacgccttgagaacgatgagcacgaacttctcggccctattacgtttgtaagaggctacattaaaagctattgccgtgagcttaaaattgatactcaggcaattcttgctcttttacctgagcaagttgagccagctaaaaagtcaaagatgcagagcttttcgcgtcgaacagaaaaagaagcaaacgataaccgcttgatgctgtttagttactttatcttagcagtgatcattggctcatcggttttttggtggtggcaaaatagctcaccagcacttgaagaacaaaccgcgaccgtaatgccaaatcagctcgaaaccagtgaacttacacctgcagcagaacagttgagcagtgaaactgagcaacttaacgcgcaaccagcaacaagttcagtgccaccagagagtgaaaacgcacaacctgctaccaatgatgccaacgtcgttgaagctaaaaagcctattgaagagcagagtaatttagacccagagcacagcactgtggtaatgcacttcaatgaagacagctgggtagaaattcacgatggcaatggcgatcgtatcgcatttggagttaaaaaagccggttacgtgatgaccgtaacaggccctcagccgtttaatgttgtacttggcaaacaccaagtggttgatattacttttcaaggtgaagccgtcgacacctcacattttgccaaaaatcgcttagccaaatttactttaccgttatcagagtaatcgcaatgttttcagaatctcctattaaacgcagaaaatcgacccgtattaacgtaggtaatgtaccaattggtgatggtgcaccaattgccgttcagtcgatgaccaacaccaacaccttagatatcgatgccacggttgcgcaaattcaagctattcaagatgcgggtgccgatattgtgcgcgtatctgtgccgaccatggaagcggctgaagcatttaaaagcattaaagaacaggtcactatcccgttggtaacggatattcattttgattaccgtattgcattaaaagtggcacaatatggcgcggattgtttacgtattaacccaggtaacataggtagcgaagaacgtattcgtgccgttgtagactcagcgcgtgagcacaatatacctattcgaattggtgtcaacggcggttcattagagcgtgacttacaagaaaaatacggtgagccaacaccagaagccttgcttgagtcagcaatgcgccatgttgaaatcttacagcgtttagactttgatcaatttaaagtatccgtaaaagcctctgatgtatttttagcggtgggagcatatcgtctactagctaaagaaatcgaccagcctttgcatttaggtattaccgaagcaggtggtatgcgttcgggctctgttaaatcagctgttggcttaggtatgctgcttgccgaaggcattggtgacacactacgcgtttcacttgctgccgatccggtacaagagatcaaagtgggttttgatattttaaaatcattacgcattcgctcacgcggtattaactttattgcctgcccgagttgctcacgccaagaatttgatgtggtaagcaccatgaatcagcttgaagagcgactagaagacgtggttgagcctatgtcagtgtctgttattggttgtgtggtgaatggtccaggcgaagcactcgttagcgacataggtcttgcaggagctaaccgccgttctggtttatacattaacggtgagcgtcaaaaagcacgtattgataacgataacattgttgatcagctagaaggttatgtgcgtgactttatcgccaaaaaagagaaagaaacgccaatcgacatcaaaatcgttgaataattcgcatatactcggcaaaccctcaggtttgccgtttacctttatcgcccaaacggtataatagcgggtcaattttttagtttttcttgatgcgcgatttttcagcgcaagtacagtatttaggatttatcagtggcaaaacaaattcaggcagttcgtggtatgaacgattgtctgccaggcgatacgcaaatttggcagaaagtagaagacattttacgtgaaacagtttcatcgtttggttatcaagaaattcgttttccaattgttgaatcaaccgaccttttcaagcgctctatcggtgaagtgactgatattgtagaaaaagaaatgtatacctttgctgaccgtaatggcgataacctaacacttcgccctgaaggtactgcagtatgtgtgcgtgcaggtaatgaaaacggtttactgtataaccaagaacaacgcttatggtacatgggtccgatgttccgccacgagcgcccacaaaaaggccgctaccgtcaattccaccaatttggcttagagacattcggcatcgccactgctgatatcgatgcagaagttattttgctgacagcccaattatggaaagagtttggtattagcgaacacgttcgtcttgagcttaactcactgggctcaaatgaagcgcgtgctgactaccgtgatgcgcttgttgcctatttagaacagcatgtagatgtactagacgaagactcaaaacgtcgtatgcacactaacccgttacgcgttttagatagtaaaaaccctgatgtacaagcaattttgactgatgcacctaaattatcagagcacttagacgctgaatcaaaagaacattttgcaaatttatgtgaacgtttagacgctgctggcgtcgaatacacggttaatgaaaaactagtgcgtggtttagactactacaaccgcactgtgtttgaatgggtaaccgatagtttaggcgcacaaggcactgtttgtgccggtggccgttatgatggacttgtagaacaactcggtggtaaagcaacccctgcagttggttttgctatgggtcttgagcgtttggtgttattacttcaagccttggaatgtgtaggtgacatccgccgtagtgctgatgtatatttggcagccatgggcgacaaagcaagcattcaagcgccaattattgcagctcaattacgcaatgacgttgctggccttcgtgttatggttcacgctggcggcggcaactttaaaaaacagttaaaacgcgcagataaaagcgatgcactcgtggccgttattatcggtgaagatgaattagaacaaggcgttgtgacaattaagtacttacgtgagcgtaaagaacaagtcaccttaaaactagaagaagcgaaaacgctactagctgagcttatttaagcccagctagcaacagaggtaagcatggaaatttattcaactgaagaacaacaagcagaagcaataaaacgctttttccgtgaaaacggtttagcactaggtattggtattgtagctggtttaggtggactatacgggtggaaagcgtataaccaaagccaaatcaccaatgcagaaaatgcatctgattcattcaatcaacttgttgaaagtggtgccgtgctagagaatgcggataacttcattaaaaacaatagcgaatcaagttatagcacattagctgcttttgttgctgctaaagaagcagtagagaaaggtgaccttgatacagcaagcgaaaagctaaactggatcatcactaatgaacaaaataaagagctaaaagcaacggcaacaatgcgtcttgcacgtgttcaccttgcacaaaaacaatttgagcaagcattaacaaccttgaatgcacagctaccagcatcattcaccgctgcagttgctgaattaaaaggcgacgtttatgctgcacaaggcgataaagcagaggcgcgcagtcaataccaagctgctgccgacaatggtggccttgataacaatccgttattacaaattaaacttgatgacttagcacaaactagcccagcggcgtaaggggttaagatgaaaaagttaacagcggcaacacttgctctgtgtatcgcaaccctaactgggtgttcgtcaagtgatgacgaagaagaactagtattaccgcaaattgttaatcaatttgaaacggacgtagtgtggcaagagtcaattggtgatggtgttcaacactatttttcacgtttaacacctgcggtacacgatgatgtggtgtatgttgcaaaccgtgaaggcctagttgaagcgctatcgcttgaaaatggcaacacgctatggcaaacagacgtacgtgaaaatgcatctttttggccttgggaaaccactgaaagtgccaaattatcgggtggtattttacaagcttacggcaagatttatattggctctgaacacggctatttaacagcccttgatcgcgaaaccggtgaaattgtttggcgcaaaacaatgcctggcgaagtacttgctaaaccagctgcaggcgatggcctaatttttgtaaacttagcttctggcaaattattagctgtgcacccagatacaggtgaagagcgctggcgctttgaacaagaagtaccaccgctaacattgcgtggtcaaagctcaccaaccgtcgcaaatggtggtgtattacttggccttgaaacaggcaagctaagcgtactaatttcagaaaacggttactctgcatggagtgctgaaattgccacaccaaaaggggcatctgaatttgagcgtttagttgatgtggatactcaagcactgatcagtggcccatatgcttacgcaattgcctataatggtaatttagccgctgttgatattcgttctggtaatgttgtttggaaacgtgaatatagcagctaccgtgatttatctatggatagccagtctatctatgtagttgatagcgatggcgttgtttacggtctagataagacatcaggtattgagcgttggagccaaccggcactacgcggctggtacttaacaggcccaactgtggctggtaagtatttagcactgggtgaccaagaaggtaacctgcactggttagacaaagaaacgggcgagcttgtatcgcgcgaagactttgacagctcaggcttctttatcgagcctgttgttgccggtgacaaattaattttatacacccgagatggtgaagttagcgcggttaaaatcccaaactaacttactaatagtaaacgttatttttctaaggcttcgcttggcgaagccttttgttgtttttttaagaggtagtttatgcttcccgtgatcgctcttgttgggcgacccaatgtgggcaaatccacattatttaaccgtttaacacgtactcgtgacgccctcgtagccgactttccaggcttaacacgagatagaaaatatggccaagctgactacgatggctatgaatttatcgtggtagacacgggtggtattgacggctctgagcaaggtattgaaaccgaaatggctgagcagtcgctattagcgattgaagaagccgatatcgtgttatttttagttgatgctcgcgcaggtatgactgctgccgaccaagcgattgctaaccatctacgcaaacaacaaaagaaatgttttgttgtagcaaataaagtagacggtattgatgcagactcatattgtgctgaattctatcaattaagcctaggtgaagtgcatcacattgcagcggctcacggccgtggtatcacgcaactccttgatacaaccttacagcctgttattgctgaacttgcaagcgaaagtgaagagcttgaagaaagtgatgacgaactaattgatctttacagcgaagatgaagaaggcgaaaacagcgagcaagcctttgctgacaagccaataaagcttgctattatcggtcgccctaatgttggtaagtcaacacttacaaaccgtatcttaggtgaagaacgtgtaatcgtttacgatatgccaggtaccacccgtgactctatctatattccgatgacacgtaacgataaagaatacatccttatcgataccgcaggtgttcgtaagcgtaaaaaagtaagtgatgttgttgagaagttctcagttattaaaacattacaagcaatcgaagatgccaacgtcgtgttactagtggttgatgcgcgcgaaggtatttctgatcaagacttaagcctactaggttttgctttaaatgcagggcgttctttagttgttgctgtaaataagtgggacggccttgatgattacgttaaagagcgtattaagtcagagcttgaccgccgcttgggctttatcgattttgcacgtttgcattttatctctgccttacacggcacaggtgttggtcacttatttgagtcagtagacgaagcctacgagtcagcaactaaacgtattagcacagcgatgctgcgtcgtatcatggatatggcacaagccgatcaccaaccgccacttgttcgcggtcgtcgtgttaaacttaaatatgctcacgcaggtggctataacccaccacgtatcgtgatccacggtaaccaagttcatgacttacctgatagctataaacgctacttaatgaactattatcgcaaagcattaaatatcataggtacgccaatcaaaattgaatttagagaaggcgacaacccttacgctggtcgtactaacaaagtgaccttatcgcaaaaacgtaaaatccgtgcgtttgcgaaagaaaatcgcaacaagtcttagccaattgctaaactaagtgtaaagtattaaaaaaaaccttgtgagtatgacttacaaggtttttttattactaaaactatgctttatttaataaacgaacaataaatagagcaacataaatggactttttaagtcaggttatttacgtcgataacgtagaagaagtactcgacttttactatcaagcatttggttttaataccaatcatatcagtgatgatgccgattacggtgaacttgttacagggcctgttaagcttgcttttgcaacccatccgcatgcgcaatcgtattttaagcaagggtatattcgtgcccaccctaagcaacctgcacttggttttgagctaaggttcagctgccataatttagtagaaagttacgataaagcagtgcttgctggcgctgagccattgtgtccgccaactaaaaaagacgcccagcattatgcgtatgttcgtgctattgagggcaccttggtgtgtttaatagaagattagccatttgtaatggttagtcttttgttaggtcagtgtgcagctcaagggttaattcacgtagtaactcgattcgctccaaactcatgtttgagcgcgccattaacttagccgttaatgcttcggcatcagttttaagctgcatgccctgctctgttaatgagattacttttttgcgctcatcttcattcgatacctgacgcgtcaataaacctttcgtttctaagcgtttaactatcggtgttaaggtgcctgagtctaagtgcgtatcatgagaaagcgcttttaaactcacctgatttttataccaaagtgagtgcatcacaatatattgcggataggtcaagtcataagcttcaaggattggtcgaaacgctctgatcaacgcatttgttgcactgtataaagtgaaacacacattgtctgataagttgttgctcatgctattaccctaaactgaaatacagccgtattattgccttaatttagtttgcgcgcaaattattttctgacgatctattgccttttaccgtaaacttcattaaattggccacaaatagtttgcgcgcaaataattagtgcaagctataattattcgctcactagcctagctagctcaagtattcgaggtttatatggttacaagtcaacaaattcacttagtttcacgcccaacgggcatgcctacacaggctaattttgcgcaggtagacgtatcacttccagatttgaacgacggcgaggtattaattaaaaatacttggatgtctgtcgacccttacatgcgcccacgcatgattgatcgtaaatcatatatctcgccatttaacttaaacgaagtgatggaagccggtgctatcggcgaagtagttgaatcacgcaataacgactttccggtaggaagcaaagtaagtcacattagtggctggcgtaccatgcacattagcgatggcagcgatttaaccctactacctaatgtaccactgcctgaccaactatttttaagcactatgggcatgacagggttaaccgcatgggcaggtttaacaaaggtaattagcctaaaagaaaccgacaccgtgtttgtgtcagcggcatcaggggctgtaggtagcgtagtgtgccaaattgccaaactaaaaggctgtaaggtaattgcatcggttggctctgacgaaaaagctcagatggtaaaagcgttaggcgttgatgaggtaattaactataaaacggtagcaaacctaacagaagctcttgaacaagcggcaccacaaggtattgatgtgtactttgaaaacgtaggtggcgatcatctggaagccgcacttaatgtaatgaacgattacggccgtattcctgtatgtggcatgatctcaggttacaataacgacacagcacagccagggccaagcaacctgttttatatcaactcgaaaaagctcaccatgcaaggctttatcgtgattgattattttgatcagttccctgagtttattgagcaaatgggtgcgtggatcagcgaaggaaaaattaaatctgaagaaacggtttaccatggcatcgaaaatgccgttgatgcatttcttgggctgttcgaaggtaaaaataaaggaaaaatgctagttaagctttaacacttaatagctaataaagcctgtatcttaattggtacaggcttcttattttcagtcattcaaaatcgataaatacgcaagttctgctagtttttctaatgatgacgttgcattagactcaggctttttagcatgaacagagtgacgtcttttcgggattttaacttgaataaaaccatgattgttggccatatcaatacgcagcatttcacgctcttttggcgttaaatgattttcatggatcttttcaagctcaccatgatcgagccaaatagctgcacagtttgggcactcgtctatttcaaccacttttagtggactaaaaaaacgccgcatcatcaccacctcagggcacttcgggcaattaattcgcgttgctatatcaacacattctgttggaagggtttgtaaatgagccaccagcacttgcgcgggttttaaattcggatcgctaaagtgaaatatttgtcggttatcaaaaaatacgccaccagattttgataaatatactttaacatcgccaatactcactgcttcaagggctgttttagtacgtgggcaaaacatattacatccttgtttttataattaatttagcgcttttgttattaacggcttaagtggctcaggtaagctgatgtgtccagctaatacaaattcatgtgcttcatctgacattttttgccatgttttacgaataatacccagccatttttgctcatcgtaatcaggcttgctacttgcaaagtcaagcatgtaatgctcaataaacacgaggctggcgatatcttcaatcaattggctatcaggatttcgttttatattttttttagcaacggctgcataaacacgctcacaatcagccgttgaataaccagccgctttcatgagggctgttacacgctcagcatgaaaatcatataaagcagtgcgccattgataataaccttgcttacccataggaaaatcacttcgcggagagcgccagcgctcaatatgttgccctcgggcagcaatatgcattagctcatcggcttgaggcttaaaacgattgagcatatcggtcatacgcatggcatataaaccttcttttgcaaattcttgttcatcgactagaactctgtttgggtctactgcattggctgtatcaatggctttaataacggcggtatacatcatgggttctcattgttattgcttcaaagtgattgtaaatggcaacaatcactttggctatattgcatcaggcaatctggtactgctagcttgagatctagttttgcaaagttaaatcagtagcaatactttgctttggtttttctatcatgcgcgcgagctctttttcgccatcgctaacgataatggttggcgtatacagtaaatcgtgctgctttgctaaaccggcaggatcaagcttatcgtagcctacagccactaatttaagggatcctaattgcacattcgctgtatcaataagttttaaaaaacgagggacttcacgtttagagtcatggcaccaagtgcctaaaaacactaacacttgcttaccttgcagtgctcttatagtacttagctcttcttcactgggtgagtaatcattatattcttcactaaaagcaggatagtctttaagtaagtcggcaacgctgatatctccactataaggacctgagcttgcaaatgtaaaagcagaaaataacaataaagcgatataaactaattttttcatattttgttctctgaatatttttctcaccataaccaatttaacagcaacactccagcatgctattaacgtgaatcctgttttttgcagcttaaattggcatgtaaagtaaatgcgaactactatattagatatatctaatataaggccttacaatgcacactttaagaacgatagcgctttgcactctattgctttcacctaacctttatgctgaaacgaattctgctaccctagaaacccaagcagctgagcgagcaactgaatttgccactacgctcaaatcagcactaggagccgctataaaacaaggcggtttagttgaaggtattaacgtgtgcaaaatgcaagcccctgctattgccgaaagcttatcaaccgatggttggactgtggcacgtaaaagcactaaaaaccgaaatccgaacaataaaccagatgactgggaagctgaaaaaatcgcccagctagttgatatgatcagaaactcagaaagcattgataatgtgactttctcgaccaataaagatggccaattccgctttgctaaagcaataaaagtcgcgccagtttgcctcaattgtcatggtcaaacgattgctccagaagtaaagcaagtgcttagtgagcattacccccatgatttagccacaggctatcggcttggtgatttaagaggaatattctctattaccaaagaactcgacacgtctgagccataaaatataagccttatgctcgcttagtttgctcttagccattaaaatacgcttttaaaattaaccaaggtgtttttatgtcttttcctccttgtccaaaatgtaattctgaatacgtatatgaagatcaaaacaacttagtatgtccagagtgcgctcatgagtgggatccaaatgctgttaataacgatgatgtgatcgatgtaagagatgctaacggcaccttattggtcgatggcgacaaagtgactgttgcgaaagatttaaaaattaaaggcagctcacaagtaattaaaattggtaccaaagccgtgatccgccgcgtgttagataaaaaagaccacgaactagactgtaaagttgatggcgtcggtgaaatgatggtaaccgctaagtttgttaaaaaagcttaataaacatatagagcagtgcctaatataaaaacactgctcaatcagtatactttaaagaaataaaaaacatttcaaataaaataccatttttattcaaagctatagaacttcactaaaatatattctatttagaatcaaaatcataaaaaatacccaaaaacaacacactgaacccaaaacagaaccagaatacctactttaaggtacaggaataataaatttatactaattattttgcattaaataattgttcacctacacttcttttcgatcattatttcttgaatatggaatatgatttaaaccacgtttaaaaaagcaggtattttgaacactatttaggaactataaataggtgctcatgtagttatacaaatatgtttttaacaaaactaatgtattaatactgccaaacctactgtgaggtagggacggaaagccacgggtcttctctgaaagaagtaaggaaatgggaagatagccgggttgtggaatttggaatccagaacaatgaaacatcacatctttagcacagcattacttgctgtcgctttcacatcaacagcttacgcagtagacgatccgaattttggtgcacagtcattgcgaggcgaaatcggcacgaaaggagttttcttgaccattccttacgatgaagttcgttacggtaatggcgataacaaagcatatataaaacctgaagaatacaaaatgatgtactctgatagcattggcggtaaagtaacctgccctgctattaaagggccaggtttaaaaggattgaattaccatcaattcaaaaacggcattgaatgctcatggaagtctcgccccggcagtaatgccgaaattattacttttactttaatgccaggtggagacacaggaaagtcgccaaaacattatcgaggtaaaaataaagtcgtaacatggaaaggcattattaacgatgctaatggccaaggtgctgtaacgaaaagctataaaacaaccctaagtttggatatgttcgattaccgtaatggtaactctcataaagcttttgttttcaaaaagaatcataaagtgaagcttggggattttacgtcgactaaaggttctatccgtgactttatttgtgacttcaatggtcaaaaaataaatgtacttaaagatcatgctcctgttggtcaatttggtaaaaaaggcgtcaagtgcacttatatgcttaaacaaaatggtaaagaccctcattactatggtgaagtcgtatttaaataataaatttaaaaacaattaataaaagactgttaattttccttttcattcaaagcctagcctgcgctaggcttttctaactcactttaaatagcaaatattttcaacaataatccctgttacttcacaatgttcgcagctcaactgccagccagcagcccatgtggttgcgcttagctttgctgcgcaaagtgggcaaacttcgccagcaaacgtactgggggtaatatctttagcttgcttagaaaacggtcttaacaaccaaagaatattatcgtcgatactgatggttagatcgtggcgtaacgtctcgcaataagcatcaaacaccgcttgtttgtactgtttttcgtcgtttttaaacaacccacagccaatgctcgaagagcttttcaagtcagaagatgactgattttgttatttctgatgctatgcatgaataaaggtaagcaataaagcatgcttacctttatagggcgtgtttagatttaactaaatttgttttggtaatttagtcgaaataaaagcagtaataacaataaataacagcgatatagccaaacaggctgctaagccatacacctgaaacactaagccagacaacacagtaccaattaagcgtcccatggcattagccatatagtaaaacccgacatcgagtgatacgccatcggcgtcagccatgctaacaattaagtagctgtgcaaagatgagttaattgcgaataacacgccaaataacatcaacccgcctatcagcattggttttacagcccagtcaaagccaatagcaagggcaatgactagggtgactaaagcaagcaatgatgcccacttaactgtttctgcacttggtgatgtttgcttattaagcttaatgattttaggtgcaaaagattgcacagccccatagccaataacccaactcgctaagaaggcacccacggtccagtggtcccaaccaaaggcttgtgataaaaacaccggtagtgcaactacaaaccaaacatctcgcgcaccaaacaaaaacaacctcgcggctgacaagatattaattgaactactctttgaaaatatttcgttaaacttaggtttgtttttagctttgcctaaatcatttttaagtgcaaaaagactaaaacaccacaccaccagcaaagtggcagccatcgcgagcattgcacctttaaacgacattaatgtgagaagtaagcctcctaaaaagaagcccacaccttttaaggcgtttttagagccagttagtatcgccacccatttaaacaaggtgccttcttggccactggcaaccagcattttaactgagcttttagcactcattttattgagatcttttgcgatgcccgatagagcctgcgccaacatcacataggctacactcagccattcagcggggactgccaacatgaacaaggctgcaacctgtatggcaaggccaatgttcatggtcttgtttaaaccaagccttgcgcctaaatagccgcccactaagttagtgacaacaccaaaaatctcataaaacaaaaacagcatggcaatactcaaaggcgagtagccaagcgcatgaaaatgcagtaccaccaacattctcaatgcgccatctgtaagcgtaaatgcccagtaattcccggtaacgattaagtactgctttatatcagcgggaagattagccaaacgcgtcattgcttttaaccttgtagtgatcgcgcaactttacgggcaagttcggcagtgcggtttgcgtaaccccattcgttatcgtaccaaacatacagcttaacttgcgtctcgttcacaaccatggttgatagcgcatcaacaatgcttgagcgtggatcagttttgtaatcgatagaaacaagtggcttttcttcatagcctaaaatgccttttagctcgccctctgcggcttcttgcatccattggttaatttgctcagcggtggttggctttgtcacttcaaacacacagtcagtgattgatgcatttgctaaaggaacacgaaccgcgtggccgtttaatttgcctttaagttcagggaaaatatgtgtaattgctgttgcagagcctgttgtagttggaattaagctcatgccgcatgcgcgagcacgacgtaaatctttatgcggcgcatctaagatagtttgcgtgttagtaatatcgtgaatggtcgtcattgacccatgtttgataccaattttttcttgcaatactttaaccacaggcgctaaacagttggtagtgcacgatgctgctgtaacaatatcatgctgatttacatcgtataaatcatcgtttacacccattacaatattcagcacaccgtcttcttttacaggcgcagttacaacaactttcttcacaccttgatcaagatatgcctgaagtagtgacttttctttcatcacgccagaggcttcaataacgatatcgcagccagaccaatcggtgtctgcaattgctttattttgcgtgacgttaattacgtgaccatcgatgatcacactgttgtcgttactttcaacctcatgaggccaaataccgtgtaccgaatcatactttagtaagtgagctaatgtagctgcatcacccgcagggtcattaatttgcacaaactcaacgtcgtcccatgcaaacgctgctcttagcgataaacgccccatgcggccaaaaccattaatgcctactttaattgccattgttaagctcctactttttaaaattgtctaacttgttttaccgggtttgccgacagttaacagcaaaccgttttgtttaattgcaacagcgcgccacacgagttgggcgatcatcccccatcgcatttagccttgctaactcgttttctatgaaatttggttcgtttaccacggtcgaggtaattgtttgtttcatccacataggtagagtcgggtttaaagagtaaaacacccactgctggtgttttctatccgacaaaatgccctgttttttaagttgcgctaaatgccttgaaacctttggttggctctgctcattaagtgccgtcattagttcgcatacgcatacctcttgctcaacggcgataagcaataagctttttaaacgaatatcatctgcaagggctttataaaatgtagttggtgaaatcgatgctggtttttctttgttatgggattgcacaaactgtttaattcgctcattgagctcttgcaaggttttttcaaaggcgtgaggttcaggacgcgttttaggatcaataaagtcccatgcaaggcaatggctgccatcgacgcgattagcacattcttttacagcgtcatcacatagggtaatgacgtaatcaaaatgcagattagtgacatcgtttaagtgttttgagtgtaagtcatcggtttttaagccaaaatgatcaatcgccgcaagcgtacgagggtctaccgcataaggttcggtacccgcactaaacacctcaaactcacctttaccatgatgtttaagcaacgcttcagccataattgatcgggctgaattttctgtacataaaaagagaactttcacgactcactccataataatttggttatataatatttttgttatataaagtgcgcaagttatttattagtttaatgctgactcttagtgagagttataagtgaggtaatgatggtttatctggctatttacttgcttaggcttgggtgattttttaaaaggctgctttaatagttgcagccttagcaaatatattttgaggagtttaaagaagttactgatgctcccttaagtctctttcaaattcagtttctgttttaactggagtgcaatgtgtagtgacttcagttttgccaattttttcaggttcgtctgagctataaatcgtggtgttataacttcgatctatttcccctgggcagtgatgatctgcgattactacatcctcaaactcacccatttgctgctgtgaggcacagccagataaaagtaatgcaataaaggttagtgtgtatttcataacaaatcctcttcaaaagttcggggtgagttttttggcacattgtcttggcgtaaaatccattttgctatgtcatctttacgcataaacttaacccccttgtgctgctttgcataggttataaagtcatccaacgctttcactctagcgggagtgcccgctaatctatcgtgagcactgatagacatcattcttctgcgttgtttgccttccttgtagagcacatcaaactcgtctttaagctcttgtaaatacgccttaccagtcatggctgtgctgccagtgtatcgaactatatcgttgtttcgaaaagtgtatggaacaacaacaatgtcgtcacttccaactggtgttagcgatggttcatcacgagataaatcgtctatatgataaataaaacctaactctttaaggattttgagcgtattttttgaatgcctcatccaaaaagcattaaaccctacaggccgctgccctgttacttcttcaatgatatttgcactttttatgtatgactgtcgctcctgctcttcactcatagagtattgaggggtccaagtttgtccgtgccctgatgcttcatgcccgcgctgcacgacctcttttgctaactcagggtttaactcaacagctcggccaaccatatgagaggttactttaatttgatgcttatcccataagtctagcagtctaggtatgccttcattcatgccatactggtaccaagaaggcgaaatagtgtcaggataaccctgctcttgcggtggaaacgggcctggatctgattggtcttgcgctgttgcctcaaactgcatcgaaatagagatcacaagttgagcatcatcaggccaaaatacagattttgcctccttcgcttgagcgacacctatgcaacttagaacaaacaccgacgcaattaaaattggctttaaaaatttcatcatttattcccctgatatactgggtagtctgtgtaacctcgctcatcaccaccaaataaagtagtaggatctgatatttcattcagaggtaaattgtgctctaaacgataaggtaaatcagggtttgcaataaactttctgccaaacgcaacatagtcaactaagccttcagcaattagtttatcggcctttgttaatgtgtaatttcctgcaaccactattttgccaccaaagctttcacgtaatttaactctaaactcatctgttacgatgggagcatcatcccaatcagcttctgctaaatgcagataagcaatgccgagttcatcaaactttttagctaaatataaaatggcatcgattgcttgcggatcatccatgcctctttgtgtaataaaaggagctaatcgaatagccgttttttctgggccgatagcttggctaattgcggtaatgatttgcagcgcgaactttgctctatgttcaatattaccgccgtattcatcggtacgtttgtttgatgtttgccttagaaattgatcaattaaatagccattgcctgcatgtacctcaacgccatcaaaccctgctgcaatcgcatttaaagcagcttgtttatagtcttcaacaatgcccttaatttcactggtcgataattctcgtggtgtagggcaatcgagcatattcccttcgccattttcatcaaccacccacacttgcgcatttggagcaatagcacttggcgcaactggcaagccgtctggatgaaagacactatgcgacattctgccaacatgccataactgagaaaaaatgagaccattttgctgatgaacagcctgcgttactttgcgccatccattgatttgctcttcagtataaatcccgggggtaaatgagtagccctttccttgtgcagaaatttgcgtcgcctctgatactataaaacctgcacaggctcgttgcgcataatattctgccattagacttgtcggaatatcgcctggttgggccgtacgtgaacgggtcattggagccatcactattttatttgcggttttatgatgaccaatttggtctgtattaaatactctatttttcatgtgtgtaccttttaaataagctcgctgcgtgtaaataaaatttctatttttaagccatcaggcccttgaataaacactttatgctcattcgctgccggcacttcccgctcaacgaatggtattgaagttgcttctagccgtgctttaacttcttgataatcagttgcaaagaaagcaaggtggtcaaccgttgataagccaacagcttctgttgataccgaagcttgggttaagtaatcagattgcgattcatttatgccaaacttagctgctatatgaatgcatggtgtatccaagtcgtcatataaccaaacaccatcaaaaccaaatgctggccttggcccctttttaaggcctaacgacgactctaaaaactgagccatgtgctggatattcgttgctaataacagagcatgattaagctgcatttctatctccttaaagtgatgaaatgagtttaactattttgactaaattgataattagccttagagttaaatcagtattcattcaaactgaagaataatgtcaaaaattgatgatatggcgctttttgttcacgttgtaaaagcgggaggtttagccgctgcgggaagaaaattggggctttcgcctgcaagcatgacagcacgaattaataaaattgagcaaaattacgatacgcgattgttaacgcgtaatacgcgcagtattgccttaacagatgcaggcgaacgtttttatagtggctgtttaagagtattagcagaagtcgaaaacacagaaaacatacttcaagagtcgcaacaaagcctaagaggccagctgaaactctctgcaacatctgactttggtcgccagtttgttgcacccgcattagcagaattcatcaataaccacccaaatgttaaaccgcatttagtactgacagatggggttaccaatattgttgaggaaggtattgatctggcatttagattcggcaatttgcctgatagtaacttgattagccgcccgctatgtaataaccgccgtgtgctttgcgcctcacctagctatatagaatcgtttggcttgccaaggcatcccgaagatttaaaaaatcatcgttgccttgtacttgagcgacttgggcaaccgctaaatgactggcattttgaggtagataacacgcacttttctattaaagtagctccccacctttcatgctcagacggtgaggtggtaagacgctgggcaaatcaaggccatggcatagccttaaaatcatacattgatatcaaaaatgacctcaaaacaggcgaccttattttgatactagatgagtatgttcgaggctttagccacagcgataaaaaaagtgtcggcctacaggtgatatatccaagcaggcaatttcaacctcggcaagtgaaagcgtttatagagttctttgagtgttggtttaaagagcactgctaactttaaataaatcgcaaagtagatttaatcgttaaaactactttataagcatattcacagccataataaccagcagccctgcaaagatttttttgatggtagagacaggcaaatgatgcgttgcttttgcacctaatggcgcggtaaaccacgaagtacaaacaataccaaacaaggcaggcaaataaacaaaaccagcaaagccttcttttaatgtaaagtactgactgccagaactgatgtaacccactgagccaaatagcgcaatgacaataccgcacgccgaagcacagccaatagcttttttcatatcgaccgagaaaaacgtcagtaacggcacaagtaccgcaccaccgccaatgcctatcatggcagaaagcccccctgtgatgcttgtgtaaagcgttaaaagccctttattaggaagcgagcgtgatgtttggctgtcgtttttactgctgaaaatcatttttaatgcaataagcaccacactcacagcaaacactattcgcaccacatttgccggtaatagcgaagccaaaaaaccactgataagtgcgcctagtgcaacccctgtcatcacccacggagccaattgccaaggcacattaccatttttatggtgagcgatagctgatgaggttgaagtaaacagaattgaggcaagcgatgtagcaatcgccaccagcacaacttgctcagcaggtaacacctgaaagtgcagcaagatcatgcttaatatgggcacaatcaccaaaccgccaccaattcctaatagcccagctaaaaagccaaccccgctgccaagtacggcgcaagcaataataagcacgattaattcgttcattgtatttgtctgtattgttgatttagggaaccgagtataacaacaataaagtacggggttgctctcaaaagtactgttaagtagtgaatattactcacgttttatatgaaattactgcaactccaataaattaatttagaaatctagacgtccaaaatgacttaaaagcattttttcactatccgttcctaaaagttttactaaaacagtaaatatttatgaatctgcctcatgttttacctgaaataaaaacgtttttcttcatgatagtaagcacgtataaattgatacccaagccacctcaaagttaatgacctagcgatttaaggaaggtgagcagcaatcatttatctcaggaaatatggacacattgctatgaacaacgattttaaatatacagttaaaagtttaaagctagacgaaaactatcacccatctaacagcacgcgtattacaactaactttgctaacttggcacgaggcgcaagccgtcaacaaaatttgcgtaatgcattaaaaatgattgatagccgctttaatgcactagcaaattgggataacccgcaaggcaaccgctattcagtagaacttgaaatcatttcggttgatttagaaattgcggggagcgctgaagctttcccatctattgaggtattaaaaaccaacatcattgatcaccaaactaatgaacgtatcgaaggaattgttggtaataacttttcatcgtatgtacgtgattacgactttagcgtgctattgcttgaccataataaaaacaaaacagagtttactattccagataactttggtgatcttcatggcaaactttttaaaagctttataaattcagaaacctataaacaacactttaaaaaaccaccggttatttgtttaagcgtttctgataataaaacctatcatcgcactgaaaaccaacacccgattttaggtgttgagtatcaaccgaatgagtcctcattgaccgagcaatactttaaaaaaatgggcttacaggtgcgctattttatgccaccaaacacggttgctccgctggcgttttatttctttggtgacctgctgaatgattacaccaacttagagttgatcagtacgattagcaccatggaaacatttcagaaaatctaccgtccagaaatttataacgccaatgccgtggcgggtagttgctatcaaccaaatttaagaaacaacgatcactctatcacgcaaatcgtttacgaccgtgaagagcgcagccaactggctgttgcacaaggtaaatttactgaacaacactttattaagccttatcaatcagtacttgagaagtggtctgctaactgcactatttaatgagagtaaaaatgaaaaagttattaccgacatctacagcaggcagtttaccaaaacctgcttggcttgctgaacctgaaaccttatggtcaccttggaagttacaaggtgcagagcttaccgacggcaaacaagacgcactacgcgttgccttacaagagcaacaacaagctggcgttgatatcgtgagcgatggcgagcaaacccgccagcactttgtgaccacctttatcgaacacttaaatggcgttgattttgaaaaccgtaaaacagtgaccattcgtaatcgctacgaagccagtgtaccgagtgtgataggcccggtatcacgcagcaaaccagtgtttgttgaagacgccaagtttttacgttcgcagaccaagcaacctataaaatgggcactgccaggacctatgaccatgatcgacaccttgtacgacgcgcactatcaaagccgtgaacaattggcgtgggaatttgccaaaatcctcaatcaagaggcaaaagagctcgaagccgcgggtgttgatattatacaatttgatgagcctgcgtttaatgtgttcttcgatgatgttaatgactggggcattaagtgcctagaaagagcaatcgaaggcttaaagtgcgaaaccgccgtgcacatttgctacggctatggcatcaaagccaacactgactggaaacaaacactgggcaatgaatggcgccaatacgaagaagtattcccaaagcttcaaaagtcgaatatcgatattatttcgctggagtgccacaactctcgcgtacccattgagctattagcactgatacgcggcaaaaaagtgatggttggcgccattgatgtagcaagcaatgaaattgaaacccctgacgaggtagcacacacattacgtgaagcgcttaaatatgttgatgccgataagctttatccatgcacaaattgcggtatggctcccctccctcgcaacatagcaagcgccaagctcagtgcgctaagtaaaggcgcagagattgtgaggggggagattctagcggctaggctctagctctaggagtagttgcgagttactagggaaaggtgaaagttacgaggtacgaggatcgaggtgtgcacctacctcatcccttgtcgccataaatgacgacctacattgtaggtcgggctttagcccgtcaaattttaaatttagtctgaacctgattgtgtagcagcgatttcacatcgcgtttatggttttatttttacgagagtaagttagcgagtttctagggaaaaagctagcgagttactaggggaaaggggaaagttacgaggagcgagatgcgagatgcgagatgcgcttctacctcatcccttgtcgccataaatgacgaccttgtaggtcgggctttagcccgtcaaattttaaatttgaaatggacctgattctgtagcagcgatttcacatcgcgtttatggttttatttttacgagagtatgttagcgagttactaggggaaaggtgaaagttacgaggtgcgaggatcgaggtgcgcttctacctcaccccttgacgccataaatgacgacctatattgtaggtcgggctttagcccgtcaaattttaaatttagaatagagccggattatacgtaagcgtgaaacgtgtttcgcgcgcccgagaacttaacccctagcgccattgttaacctttagggtgtttaagctcaagcaagtcccatttgttgccatataaatcttgaaacaccacgacggtaccgtaaggctcttcccttggtgattcattaaatacaacacctttacttttcatgctgttgtaatcacgccaaaagtcattgctgtgtaaaaacaaaaatactcgaccaccggtttgattaccaacagcgtgcatttgctgttgattactggcttttgcaagtagcaggtgtgtaccgttagaacccggtggcgagactaaaacccaccgttttccctcgcctaaatcggtatcttcaatcaatgtaaattgtaatttttcgatgtagaaggctatggcttcatcgtaatcatttaccaccagtgcaacactgccgatgtgttgctttatctcatttttcattacaaaaccttgctgcataaaacccatttggattatcagtgtgcctattaacgaaaaacaaaacaactgattaagtgaatgacagtttaaagccgcagcacagcaatatcagcggataaaaaacaagaaaataaagaataaaatattcaaagcaaagacacccaaaaagctcaaccaattgttttaattgatcatgtataaataaacaccagaaaaaacacctcgtccccaaaacgaaaaaactcaattaaatacaaaaagttaaatgtttttaggtacaaaacaaaagaaaatccaaaaacattaaacaaataataaaatattcttgatctgttctatatttgtactattttaatttaagcagcgactgtataggtgttgtatttcggtcactggtaattaaaaagtaagatcctttaagggtcttagtttcgctattaatgctcagtaacaacgagtcagattaaaataataacaaatttgaaaggtgcaaaatgaaagctcttcgcttatctaaaatgaccattgcagttcagtcagcaatgctattgactgcaagtatgtcaatgccaaccttttcacaagaggtgaaaaaggacttacccacaaataaaaattcagaaaaaaatctcaaagatgaagaaatcgaagttattcaagtaacaggtattcgctcatctttgcgtgagaacttgaataacaaacgatattcagatgttattgttgattctattaatacagaagatattgccaaaaaccctgataaaaatatggctgaagcgttgcaacgtgtggctggggtacaaattgagcgacaatttggtgaaggctcgaaagtgtctattcgtggcacgtcacccgaactaaccaataccctagttaatggtcaatcagccaaatcagcatcctatttaccaggccaatcagaaagtaatgcctttgatttttcaaatattccagcagagcgtgtttctaaaattgaagtccataaatcagcccgtgccgaccttgatgccggtggtattggcggcaccgtcatattacatactaaaaaacctttggaacaagaagatggctatgggtattttaatgttgaatcagagtataacgactcttcaaagaagtattcaccacaagtatcaacagcctataactttgtctctgaaaataaaaagtttggcgcttcaattagcgtaagtcatcaacaacgcaaggcatttcgtaccggttttgaatcagatggtattgctggtaatgaaggcgcgatcagcacaggctttgcacaaacagatgcaatagagtgtccaacagaagcatgtgcgagcagcgatatcaatctgcgccatatgaataatcatgccctaatcattacacgtcacatggcgttaaatggttatacctacggtgacttagaagcagtcgcaaataatggtgcttattggccaacagaagatcccagtaactctggtgtatggaacaactatacacaaaattgggggcaactcgatgaagtgatagacccaacttatattgacccagtatgggggcttttttggggtagcagaagagaagcagggttaggtcaaactcctgctagaacattaggtaacatggtctacgcgccagctttctcaaccaatgaaagccgcctagatacaactttaaactttcagtgggcacctattgataacttaagtttaaacctagagataaatcagaataaatctgatcgagataataaaaatgacaatttatatgctcaaccacaccgtattgtacaactgctgtatagcaacgaagtgcctggcatcgatccccgactcgtgatggatcctgaacgcgatattgttttatcagcaacctaccctattgatggcacaaatttagttcgcggtgcaggcatggtctgggatggtaacaactattacgatggcgatattcgatggggtgaaatgatccgtcgcgactcaaacgatagaagtggcaccgaaactgaacaaaatcgctaccatcttactgttgattttgaacacgatgactttgtaatgaagtttcaagctggtcacacagaagcagagagtaccgtactcgatcgtggaaccacacttgccagtcgttatggggattacgaaacgctttactcaggtgacgatgcatctttaaaaatcccaacttatgaaggggtcaatttagggtatggatataaccccgataccggcaaagtatattgggggcttgaggctgacccatcactaacagggcaagcgcttatcgatgcacaacagcgcgctaaaaacttcttgcttgcgcctactaacgagttttatttactaacgggtggcttaaataactctgctcgctaccgtgaaaacaccgaagattttctgcaaggagatattacgtggtctttcgagaatgacttttatattgatagcatcaaatttggcgctaagtatcgcgatatagaacgtacacagcgctactatacagaaggagcgcgttttcatggctatgcaaatgaatcaagtgaattccctctcattctagcagagcaaattgtaggtggtacggtatctggcttagactctgcgggtcatgatatacctaatgaatattttgatatcgaccaagcaaaacgtgactcattgctcaatgatcactttttattactcaattcagaaggcacaccgaatgaaggtgcttgtgtagatgcaatcgcaaactcagcaaaccctgaaaactattatggctgtcgttctggtttaactgaatcggcaggatcagcctataaagtaactgaagaattactagcctattatgcaatggcaaacttcagtggtgaaaaattcagaggtaatgtaggtattcgcgtagtcgacacacaacgagaatctgtcggtaatgaagtggcaaaagatgaaaatggtcagcttctttcataccctattgatgaaaccgatccaaattatgtcgcgggtcttgctggttttaatcagtattcgccgcttgtgcaaaaaagtagtactaaagactatttaccaagttttaatattgcttatgaccttgctgacgatcttgttctaagagccgccgcgtcaaagaatatttctcatccgagccttactcagctcagaagtaactttagcttagtaaccgaacgttaccgattctatactgacggtagacagcaagatttaacgccaaatggagatgctgagcgcctaccaatggattcgcagcgccgaggatcggttggtaatccaaacttaggttcatattcatcagtcaactctgaagtaggcgtagagtggtactttgctgagtcatctatttttgccattacagcctttcaaaaagatattaaagatatggtgcgatcatcatctcaagttcaagacttaagttacctaggggatgaagggaaaacagatgataacggttactcaatatacggagactacgttgttagttcttacttcaatacaggtgagcaaaaagtaaaagggcttgaatttcagttacaacatgatttcggtaatggttttggtggcttaattaattacacttatacagatgtgccggatcaaaagttcaacacctcaaccttttcatatgaaatagctgatatgactgatacagaaactcatttgagtgatccgtctcaacgtgagtactttgaagttactgggtttaatactcaaacagttagtcaaacagaacctatgtttggacagtcacaagacaccctcaatgcatctatttattttgaaaatgacactttttcggcacggttgtcatataactatcgaagtgaattcgccaatgccagctttacagacggtattcgttacactgatgcacgccaacaactcgacttcaaagcgacctatcaaatcctagacaatttagtagcaagctttgcagtaacaaacttaaccaatgaaaatgttgtgcaatacataaaaacatcacaaattgttaatgacccagttattaataaaatgaaatggatcgacgagattggcgaagatggtgtcgcaacaggcaatcgcgttgtcgctaaagatgaaaatggcaacaatattattgagtcttctgtctcaggagaagaggcctttgccattttatcgcaagcaagtggtattcctgttgaagagttaaaaccttattaccaaaatcatttagataagatatttgttaatgagtggactaatggccgtcgctactatttaggcataaactggaccttttagcgattatttttctattaagtggttattaaaatagccacttaatagtttacatctagccttcgcacctcatttacagcaactcgattaaagtaactactcaatacttgttaatcatctgcaaaataaacaaacctgttctaacgcccaaccatcaatttaacttttaaaaaagaaattctttaagcaaataacccactacaaaaaacttaagccattatttagcaatacttattttctaaatcctcaataaaacaataataaagaagtaagaccaactggataacctaacatctttttgctaaattaatttgaaccatggagtgggatttagttaaaggaacaacaatgaacgaatttgatattttcattaaaaatattgttttaaattgcatacgtgagcaaggtagctgcagtgatcttcatgaagaagatgaacaactaactttctatgtgaacataaacagcagcgataagttatgctcccagaaacagtttaaaataacttacccaattagttactcaattgagtctgcacttagatacgaaatcgatttacttagatacctagattcaggtgaaataagaaccccttttacatcagatattattgaagtgctaaaatcagagcttgagtattttgtatcaagcagcaaaccgcagggtgagtaccatatttgttgatacctgagtgatagcctgataaaaaaagttttatcaggctatcactaatcaagttactgccataaatttggaaacacaaaatgctttcttgctgtagcagtgacgtggatcatttttattgtatacgcgcaatcaaatggcaagctcttcattaatctagccaaacattgccggtttgatgtgtccaaaatatagatgctttgccatcactacgctgataaaaatgctttacctttatcagatgactaacttttgaaatgacctttatattgcctttaacaaacgcaattactcgttgctgtattttaagtttgctggttcttcctgctaaagactgctaagtgaaacttttaaacacaaaacaaggatgctttgattggctattttcaaacatcctcattgtgtattccaattaattcatcagcttattggtaaagtaattttaatttgtttggtaataaaagcttgttttagagagtggttttattatgtcgtactctaggccaaaagcatttctatcaccgcttttaggtatagtgtatttgtctaaaaggactactccccaatgattatcgctaaggccaccaaagatcacattgacgctgtcatactcatcttttgtaatagctgcaaccttatactcaaccattaaatctctgagttcttgtgtatcagctgatagctccatcaagtttggctctgcatcagggcttagaattttataatcggcagagggtacaaacccagcatattttgatggtgtataacttattaattgggtgggagaataaaaagtattgttaacacggtacacgtgcggcgcagattgctggacaagttttaaagtttggctatttttaaatgccaaaatttctgcctccgatacatctaaaaatgaccgaattaacttaagtctttgttcagtacacttttcttttttacaaataactaaatttggaagttttgttccaacttgctctttaacatttaaaaactggctaccaagcacacctaagttaaagttagtgaacgcttgcttatctttgtcatttttaaatttagtggcatgaatatcaaagatgctaaacggataaaaagagggtaagtaggcaagctctaaatcggtttgcggcatcatttcatccatgtgctttaataccgcgcgatattctttatctatttcatcattaaaatagtctggtctttcagccagtgctgtaacagaaaataaaaaagcactacaaagtaatattttgtttaacatgaaaaaataaatccttttgattaaaactattttgaaaaccataccatttgggtaaaaaattacataattttcagttgagccactttcaagcttgaaagaaaatcaaaacagattaaagcattaaattatttatattttttcaacattaaatcttacaagcaacaatttcattatgctaagctagctgcaattataaaaaaatatcattgattggtatcagagtagctgtatggagtaatgatcagatgataaggatattgtgcatattgctatttgcaaccaatgtggctgcaaatgatgttcagagtgaaatcaaccgtgttcttcacggttatacaacatattctgaatctgtcgaaattttagctagattagagcagcaaataccttatgcagatgtgcaagatgatgcgcatgtaatggcatttaaatgttggttttctaatacatctactcctagcgggcttagtgaatataaacattttctagaaacagccaagccaatcatccaaaaagcaaataatattaccttaaaacatgagcttgctgtctgtgaagcaaatcaagagtatacacaaggtcattatcaaatagctcttgagcacttaaagcctataatcaacactacatcagtagaaaaaacaacctcccctaagcaattatcaaccatcgctactgctcacattgtacttaaccgaattcagttagctaaaggcaactatcaagaggcattcgactctgcaaaaactgcttatcagttatttgaaaaagcaggtaacgactacgaaaaagcactcgcattaaaagaaatcgccgatattcacatagcgttgtacaactatgaacttgcaattgaacaattgcagcgtgctaagttagcgctatcgaaatttaatgagcaagagcaatacaaggtactcgatttactcgcgtatgcttatgaagaaaaaggcgacttaataaaggcggttgaattatacgagtcgattaaaaaagatgttcgtcgtttcgaaagtgataatggctatgcttacatattaataaagctgacagaactcaatataaatttaaacaggttatctcaggcagagccatatctaactgagctaaaaacactttctgttgatgacagttggattttgactctttacaacttcactaaatcagaatggtacttggctacagctcagttgcaagcagccgttacatctcatgagaagatagccgggcaacaacaatcttggcccgagagcttacaggagcgctatttaaatttaacctcacagcttgccgctgcaacaggagatactttcttacaaataacatctcagcggcaattaatcgatttaataaataaaaaacagcaggctttagcaaataacatgcttatttctgccagattaaactttaactatgagcaacaaaaccgcgaaattactcgtttagaacatgagtcaaagctacaacaaaagcttttagcagtagccgaagataagtcattttggcaaggcttaacggtgatgataacttgcgtatgtttactgctattcgccatttataccttcaaacaagttcgccagaaaaagtattttgaaatactcgctttaaaagatgagcttaccggcataccgaatcgaagagctattctaaatttaaaacgaagcgtcatgctgcaaaacaaactcaataaacaagtcagctctttgatttctatcgatattgattatttcaaagcggtcaatgatcaatacggtcacgatataggtgatgaattaatcatatccatagtcaatacgattgtgcacacagtccgttgctctgaccgggtaggtcgtgttggtggcgaagagtttttaattgtgcttgagaatcaatctttagaaaatgcacaggagattgctgagcgtattaggctttctgttgccgaaaaggagcatacctcattatcaataagcgctactgttagtctgggtgtcattgaaattgcacctaacgaaacaacggagcaggccacgaaaagggttgatttacacctttataaggcaaaagaagggggacgaaatactgttttctcttaacttttgtaggagttcaacaacaatcaaataaatagacttaggttttaataaacaaattaaacattcaactttgttctgattttacgataaataatacttaatatgacaatagtcataaatctgtaatttaattaattcataattggcgctaatttaatcacctaatgtaatgaacaagtaatggacagtgccttggtgcaactttcgtttgcactcccctctaatgaagaccctttatgtgcagcgcttgcgcatactatggaatatgaacaattgcattttgctgccaatgagcaaaagcgtgttgtattttgttgtgtgctacctgacgatgctcacgaaggtgatgtgatctctattagtgcaacacgccctgatgcccgcgagtctgcctattttactgcgtacacgttaacacaacacgatttagaacagcacgtgatcagccttactttagaaaatgtcacgcacagtggcgaatttgtgctgcaattaatgctgcatggcatgcatgcaacacttaaagacagcgcccaattcgatgttagcattgctgcaagcacatcagcagagcttttaactagcgagcaagctaaaaaccaaggtctacgccgttacatcagcaatattggcgcaacctttttagcttttttttagggtctagtcagcaaagctaattttacccatggtaatatcggggatcccttgctcggtattaccaaagcgttgttgcccacccgacaagcattcgttcgctaaaatagcaaataacacagcctcttttgcatctggatttatacctaacgagtcagtgttatttattacagtaagctctgggcaatgagccaaaataatcttcattaataatggattatgaaccccaccaccactggcgtatacagccacatcagttaagccttcactgcattggttaattgccttggcaatcatgactcctgaaaactgcactaaagttgccataacatcaaagtgcgataacgcttgcgtatttgaacgtgcttgtgccgctgctaaatagtctagattgaacacttctggcccggtggtttttggaaaccctaaaccaaaaaatgcatcatcacacagcgcagtgagtaaagcttcatttaccgcgccttttgttgcaatagcggcatctttatcataatgaaggggtgcaaagtaacgctgtacataggcatccataatggtattgcctgggccaatatcagagctaaaaaccgctcgtggatcagccgattttggcaagtaggttaagtttgcaatgccgcccatgtttaacaatatgcggttttcactggtacttgtgaagtataaataatcaccatatacagcaagcggtgcaccttcaccacccgctgctatgtgtttttgtctaaaatcacctatggtggtaatgccagcagtcactgcaaggtgatcgctatcgccaatttgtagcgttgcattgtcatattctgggcgcttatgttggtttttagggcagtgataaattgtttgaccatgactggcaatcacatctatctgctcattttcgaccccccaagaggctaacgtttttgcgaccatttcaccatgtaactggccaatccatgggttgagtaaagtgacttcttcaaggtcgcactcgcgtttggcgaacactcgttttacacgcgttttataatcatcgtcataatcaacggtggtaaactttaatacttctacatgggtgttcataccctgccctgatacttcgcatagagcgatatcaagaccatctaacgaggtaccactcatcagaccaataattaattttttttctttttttgcgcttaaatacagtttctcaatatgttgatgcataaataaatcacttaaaatcagcttattagatgtaaataagcgggttgacgacttggaatagtttatattttaaaataatagatttaaagaataattattgcaaagatttttaaattgctttaaaactgtaccagtgttctccccaaaaggagaacacgacgtatcataacaaaaagtatgactctttaaattaactaaatggtctaggtagtaaaccaacctgcgttgatttaaatgataaaacgcaagggaatcatcatgaaagcaaagacaacaaccggacatcgctcactattgctgctctcgcctttagctctagctgtaagttcagtaataagttatgcccacgcagaagacgccgaacaagttaaaaagcctgaggtgatcactgttacaggttcacgcatccaacgaactgagctggtttcaagcagccctgtcgtaagtgttgatgaagcacaaattcacttagatcgcgcagtgaacgttgaagatattaccgcaaaactaccacaggctgcagcaggtgctaacagcacaggtgcaacagtgggtgactctttcggctcatcaaccattgatttacgtggccttggccaaaaccgcacattggtgctgattgacggtactcgcgccgtaccatttagttttcgtaactcggttgacgtaaataccattcctgccggattaattaaacgcgttgatgtattaactggtggtgcagcagcggtttacggtgccgatgccgtagctggtgttgttaactttgttttagacgatgattttactggcgctgaattctcaaccagttacgaaagtgccgacggcggtaacgaaaagcttaactttgaagctatttttggcggtgacattgccgatggcagcggccatgtaactggctatatcggttatactgagcgtaaagaactattagccggcgagcgtgactacgcgcttgaaaactcaacaagcatgatcaacagcggtggttattatactgacgttgcatctggcaatagtatcggtattgctgattctggtgctgtaacaagtgagcgtcaaacagctgatttcactcctgatcgttatttaactcaaccaatggaccgtttttctgcgggcttattattcgacgttgatgtcagcgacagtgccattgcttatggccgcgcaatgtattctaaagtgaccgtaaatggtgctggtgccagtggccaaacaccgatttttgttaacgagcaagtaaccctaacgcaagacaatgcatatattcctgatgaactacgcaaccaactgacgtttgacagtgaaggcaatgcccttgttaatgttgaacgtaacctaggtttaggtgtgcaacacaccgaagcggtacgtgattcaatgcaatttcaactaggtttaaaaggtgatataacagactacctatactatgacgtatatggtcagtacggtaaaaccgacgaagtagccaccatttataataatgcgtatcgcaatgataacagtggtaatagtcgctttgcagcccttgcaaattcagtggatatttttgatcccaaccatgatttcagcgactttagcgatccgctgctttataccactcgcgaccgtactcaaagtgtgatctcagcaacactatcgggtgattctgggttcttatttgaattaccagccggtgctatcgattttgcaatcggttatgaataccgtaaagaaaccggtaaacaaacaccgggcgatgcatttagaaacggtaccagctttgcgtctatcagcgcatttgatatggatgcaagctttagctcagaagagttctacgctgaaattttagtgcctatcttagttgataaaccttttgctgaagagcttagctttgaaggtgcctaccgtatttctgattactcaaataccgaagcagaagacacctacaaactaggtatcaactgggcaattaacagcgatattcgtattcgtgcaaaccgcttaaccgcgtttagagcacctaacttaggtgagtttgccagcccaatcacagcgctatcgttatcattatttgaccaaaatagcgatcaatttgtaccacgactagcagggcgttataacggcgatccatgtttacttggtaccggtgatgcgacccaatgtgctgcgtttggtgcgccgccagttggcactgagttcgactcaagtacagcaaaatatacctatggtggtaacccaaatattaagcctgagcaagccgagtcagatacattaggcattgtttacacacctagctatttagaaggctttgacttatcactcgattactacagtattcgcgtaacagatgcggtaagccaaattcagccaggtgctgcgctacaaagctgttatgttgacgacccgaacccgaacaacccattgtgtggagcggtacttcgcgatccaaacaccggtttcattagcacagctatcgttaatgactttaacttagccgcaattgagcaagaaggtatcgacgttgcagcaaattatgtcattgatgcaccaaagcaaatgggtggtcgttttagattctcgtaccaaggtaactttgttactaaacaaacgcgccaaaacaacagcacagtgcctgaagttgactgtaaaggaacttatggcagtgcctgttcgggtgactttgccagtgttttacaagctgactacaaacaccgagcaagcattgattggcagttagataacatgaacttccaacttggctggcgcagaattggtgaagtagagtatgctgttgaccgttcagaaacaatttcagcacaaaattacttagactttgccgctgcatggcaagttaatgaggaacttgctgttaactttggtgtcgataacttattagaccgtgaaccaccaacacctgaaataggcgcaaaccactttaacactgtgagtgattatagtgtgattggccgctcggtcggtgtttcactaagatatgctccaagcttttaattaatcctactgttttagctacacaggattgatcccctcaagcgcaccctgcccggtgcgcttttttattttaaacaggcagtcatatatcaacaataaaaaagggacagcgtttagattgttggttatgatatgagcaacaaaaagcagcaaggaagatgtaatgctcaaatcaataaagtcaaaaatcccatttattttcctgattagtattagtcttttttggggtatgtattaccaaggtagccacccattaaatgactttggtaaagcaaactttgaatggttatacctacttgatgcactgatagtattacctgtactttgcttaatattaattaaaaataagaaagaagcggcttttaaagcattgatgctgtgctcactcgcgattttagtggggagttacattattcccgaacaaaacaaatttttaatgaattacttagagcaaggtcgttacgggcttttagctttgattgtaattttagagctaagtgctctcattactgtgtacctggcaataaaatccgctttaggcaagcaagccgatccagatatagctatagaaagaccaattaataagcttttcaaacaaagcgtaattgcaaactttttatgtttcgaaacacggatgtgggctttcttattttacgctaaacacattaaaccaagctatttcactggtgaacaacattttagttaccataaaaaagatggatcacaagctaacttacttggctttatttttattatcttgttagaactgccactgatgcatttatttttacactttgtatggtcatcattagcagcaaacattatcactggtttaactatttttagccttttattcttcattgcagagtaccgagcggtcgcaaagcgccctgtttcaattagtaaaacgcaactcattatccgctacgggctatatcctgcttacaatattgctttagcaaatatcaaaactattgattttaataccgacttcattgcacgcgcacgcacaatcaaacgttacaactactctggctacccgaatattaaaatcacgctcattgagcctattggagatatcaacactgtttttctaggactagataaccctcagcattttataaacttaatgaagaaggaacgaaattatgccatttagcgagcaagagcgcagtgcgcttttagcactcaaaggtgttgggccaacggtgataaaacggtttgaagaaattggtattgaatcgtttgaggagttagccgggtttgatgccaacacaattgctgaacgtgtagcgtcaatgctgcattcaagttgttggcaaaatagcccgcaagcgaaagcggcaatcaacgccgctataacgcgatcaaagcaaggctaaagttcaatcacttctattgcaccgcgcttttgcatggtgacatacactttgctttgcgtatcgttaaaggccaaattagttggatgctggccttttaattggtagctatttaatagcttgccggtaggcgatacttcaagcacctttcctgcaccgtaacgagtgataaacacatgtccttgattattaacgcgcatgccatctaagccatgctcagcaaacttaatcaaagcttttttattactaatgtttaagttctcatctaagtcatattgccaaacaactcgctgcacactctcgttcacataaagcttggtgttgtcgttattaaccgctaccccattggtggtacccatgtttttttcgagtaaatgagtgctgccatctgcattaatacgccacagctggcccgtttcgttcgcccagttagggtcacttgcaaacagcgccccgcttttggtgatagcaatgtcattgggttgattcattttactattatgggcgaacacttctgctttattgctgccagcaggtacttttaaaatattgtggttaacataatcagcaataaacaaattgccttgtgagtcaaactgtaggccattaccaacgctgtcatttggtagccttacaaataacgatgttttgcccatgttatcaacgcggccaatggttccttgctggtcatagttcaccgcgtacaaggcaccgttatacatggttggcccttcaacgccttgcgtaaaaacgttatctttaacaaagtcttggctatctatcgctagcgcagttggtgagcaaataagtgcgctcaaaacgaaaaaatgacgcgttgatttcatggtaatccttttaattatctaagctggtatacactgctaatatgggatattcgttttcaccaaaagacaaagtcaatgagcgcctttcaccatcatctaacttaatgccttcgtcaaagctttgcggatgtacacgacgcccatcagcaaacagcgccataatgtggtcagcctgtaaaatacgcgagcctgatgctttgttttcaatcgtcacaacagctaaacgacgaccactttcactgctcattaatacactatggacaatgctaaattgactttgctttgggtaatgtttgtcatcattttcaaatgcaaaattaccgctttgcagcatcactggatcaaccgataacacgtcgttatttgcataagcattaacagtcaccaagcccactaacaaaatacgcttcattactatccttttaagttagcttaattttaaaacagcatacaccgttcccatatttagcgcaaaaactcatcctaaaaaaggggatgcgttatcaagtaattacaattttagtgttgatttttaatgttatgcccgcaaaacgttaaaggcgtatcttaatttactgctggcaaaaggagcctagtatgtctgatattcaaaatcgtcaatatattcttgaatctcgcccaagtggcgtagcgaatgaaaacaatgttgttttaaaaactaactcagtatcagcgccaaaagatggcgaggtattactcagaaccatttatctatcacttgacccctatatgcgaggacgaatgagcgatgctgaatcatatgctgctcctgtaaagattggtgatgtgatggtaggcgcaaccgtatgccaagttgagcaatcaaaccaccccgactaccaagaaggtgaatgggtattggcctatacgggctggcaagaatacgcaataagcgacactgaaggcttaatgaaactggggaaaaaccctgaaaatccttcgtatgcacttggtattatgggtatgcctggttttaccgcctacatggggcttttagatattggtgagccaaagcagggcgaaacagtcgtggttgctgcagctacagggcctgtcggtgcaactgtagggcaaatagccaaattaaaaggctgtaaggtcgttggcgtagctggcggtaaagaaaaatgccaacatgccgttgaaaacctaggctttgatgcctgtattgatcacaaagcaaatgattttgcagagcagttaagcgcagcgtgtaataatggtattgatgtttattacgaaaatgtcggtggccatgtatttgatgccgtgttacccctgttgaatacaaaagcacgtattccgttatgtggtttagtatcacagtacaacgctaccgagctgccgccaggtccagatcgcttatctatgcttatgggtcacattttaaagaaacgcattaaagtgcaagggtttattatttttgatgactacgcccatcgttatgaggaattcgcaaaagacatgcaaacatggttaagcgaaggaaaaatcaaatataaagagcatcttgaagctaatttcgaaaatacgctgaacgcctttaatgcgatgttaaatggtgagaacttcggtaaaactgtcgtgcaagttcagcagccaatttaaatttcaaggcgtagtcagcttggctacgccatttttaaggataacgaatgattaaattacaccatttaaataaatcacgctctaaacgtattatttggttactggaagagcttggtgtcgattacgacattgttgcttatcaacgcaataaagaaaccttcttagcacctgatgaactaaaacaaattcatccgctgggtaaatcgcccgttattgaagataacggtaaagtaattaccgagtctggcgcaattactgactacttaattagtaagtacggcaaaggcaagtttatgccaagccagcaaagcgacagctatgttgactatcagcaatggctgcattttgctgaaagctctgccatggtgcctcttttactaaaactctttattactaaagacggctgtcaaactaactttattgccgactatgccgataatgaaattgcaaaaatactgagctatgttaatcagcaattacaaggtaagcagtacttagtcgatgacacattgaccggtgctgatttcatgatgtcttttgttgtagagcaagttgctcaggcgggtaagctgtcgtacttccctgaaatcgaacgctactttgagcagctaaaaactcacgaaagctatcacacagccaatgagttagaagcaaaatacgactgatctaatatgcagtgacaatttataaactgtcactgttttccttcttcaagaaaataaagctgcaaagctaccaatcaggttacacacacttggttgcgtcccgattcttttgcctgatacatagctttatccgcagcctctattgctgtttcaatatcatcgtcagcgcgaatagaagagaccccaaaagagccggtaatttttatctgtttatctttacctatatctatttcaagttcttcaacaccgactctcaagcgctcagcaaatgattgagcaccttttaggtctgtttgtggtaagcatactaaaaactcttcgccgccatagcgatacagatgatcatattttcttaggtgagagttaatacacttaacaagagcaaccaatactttatctcctacggaatgaccatattgatcattaacacgtttaaaatgatcgagatcgatcataatcaacgcacagctaagtgactttcttttcgcaagctcaagctcctctcgcagattgctaagtaaatgagtgcggttgtttgcacctgttaggggatcacgattatgcaaaagtttagagaagtcttcattcactgcctcaaataaatagcggactctatctaaatcttcatgaaattgatccaaaagattgaccgggatttttgaattagcttcattcaaagataaaagtactttagccccgtggtgcattttttgatgcgcaatttcaatttcagcaaaatacgggtgtaaatttttagaactagaggggagtttattaaaccaaaggccaaattcgcataatgcatgagcattatcgtcaagatcttcttcacatgctggtacattggcaataaggctacgcagtaagcgtttgtaccaacattgatgccattcaattgcttgctcaattgcagcaatgagttcttcaagttgtttatttgaaagtgaaaatatccgtttgccaccttgatcagcagtagccaattatcaagcaccttttcattattttcgtaaactaaaacaatagtttaaaaagcctataagctcaacagcaaattaaaaaagtcgtgactattattaaactcaatcaactaatcgataacccacagcgggctcagttaagatatgtttagggcttgccgcattttgctcaagcttttgtcttaactgaccaatatgtacacgcacgtattcaggacgattaatatactgctctccccacacctcagataaaatagcgttatgcgttaataccttgtctttttgctgaaataacaacagcaaaatagcgtactcttttttagttagtttgacttcttcagcacctttacgcaccacatgtttatgcgggtcgatgtgaatatcgccacattgcaaagttaggcttggtgttgtttgtgtgcgcagaagcacccgaatacgtgctagtaattcgtttgcgctgaatggtttggtcagataatcgttagcgccgttatcaagggcggtgactttttctgtttcgccgtcgcgcgcagaaagtaccagaacagggagcagactccactgcctaaactccaccagccaatcttgcccatccatatcgagcaaacctaaatcaagcagcactaaatcaaactgctgctggcttaaaagtgcaaacgcatcaagccctttcgcgcacacactgacttcatggttacttgctttgagcagtgtttttaaaaaactttgcagaggcggtgagtcctctaaaaccaaaatattagccacggctgttactccaaattaatatagctgttgcctgctttgtctgctcattgagggttaattcaaagcgcccctgatgacatttagcaaccacatcgcaaataacactccctaggccaacgccttcatcttgactcgtctcgtgcttattagcaaaagggttagttaacacaatttggtattcgtcttgtgtttcaataaattgcatgttcgccgaaccatctccgtaacgagctgcgttttcgagcatattggcaaaggcaatttcaagtaaggtttcatcgccaaaacagatgctttgttgctgagcttcgatgtgcaatttaaagttatgtagttgttgctgacggcgtgatttagcttcgctaattaaggtcaaaatgggtagtttttgccatttaatattctcagctaacttattcactttactgagctccatgactttatcaaagtgctggttaagaattttactttgctcataaatattagcagcttgctctttgataacctcagagcttagttgaatatcatcatcagccaacatacttgatgcgcccataatggtcgctaatggtgttcgtaagtcatgggataaactgcgcaacaaggtgttttttgacctttctaactcggcctgtacttttatcgccgctgattgctcgcgtagtaaggttttttcttgaacctgatacagtaaagagcacgctgtattcgccaaagcaagttgctcggcattaagcgctttagcaaacgcgatgccgccaaattcagcttgttgctcatttaaataaataaactgcttagacgctgttaactgccaatcacatgcgacctttaaatgtgcggccatggttgttaaaaacagctgcttttgttcctcaaggctatcgagatcattaagttttttagctaattcatacaataagcgactattacttgcatgggcttgcacatcgcgaaccttagtattgagctcaccggctaggtggcttatgactaaacccacaatcagcatcaccaaaaaggtgaccacatattcaatattttcgatatgaaaagtaaagtaaggcaccacataaaaccagtccgtacaggcaacactcaccaaggtagtaagcgcagcaacacgacgattactgcgcaccgcaacccaggtcacccacagcagctgtaacataacaatatcggtggttgtaaacagttctcgaaacggaaatatcgcaagcaccaccacaagtggcatcaacacacttaaaaatgcggcttttaaatactgtattttgaatactgactgcatcatcttttcacttattttttgtccctattagattaaagggttttcaattttgtcactataaagtttttataaagtttttttatctcggcataaaatctttataaagctttcaagctctctaaagacttctgtttttttgctattagcatttagcgcgtacccacaatagcgagaaagacaatggctcagtttgcagtaatcggattaggacgttttggcgtaactgcctgtttagaactttcaaaacaaggtcatacagtgtgtgccgccgatattagcgaaagcaccgttaatcattatgccgaccaacttagttttaccgtggtggttgatgccagtgatgaaacacaattagcacggctagatttacccagttgccaagccgtattggtggccattggcgagaatattgaagccagtattttatgtgtattgcatttaaaaaacttaggcgtaaagcaaatttgggtaaaagcctgtaccaaaagccatcatcagatactaagtaaactcggcgttgaccgcatcattcaccctgaagaagaaatgggcgtaagggttgcacaagcgcttaactacccaatggttaatcaatatttcccgcttaaccaatccacatttattgttgaactaggcattgatctgcaactttcaggtcgcaaaattggctggctactcaaagagcgtaatagcgatattaaaccgctcacactacgacgtgatgattatttcaatacagagctgactaacgacaccgaactgcgccacggagatagtctggtgttactgggctctaaaacctacttaactaaattagcaaaacggtttcgtgcattatgattaactggcaagccaatgtttaccctaaacaatttagcggtgtaaagtgtcgtaagcggcaaaaagtaaacccacctttagtgctcactatcggctttattgtgttaattatgctcggcacgggcttactcatgttgccaatggcaagcacccaaccgatcagctggctcgatgcattatttacggcaacctctgcggttacagtaacagggctggtggtcatcgacaccggtactgatctgactgtatttggtcaaagcgtagtaatgctgctgattcaaataggtggcattggctttatgaccgtggcggtgatttcaattttaagtttaggaaaaaccctaggcttacagcaacgcttactcgccagccgcgcttttgacactaacgatttaacctcggtgatcaaggttgctaagtatgttttagtgtattcattagtgattgagtcggtggcattttgcttactctttattagttggttcgatgactacggcgcactaaaaagcgcctatcacagtctgttttatacgatttcggcgttcaataatgcgggttttgcgttaagtggcgatagcttatcggcattcaaaggcgatataaccgtaaacctggtgatcaccactttatttatcatcggtggcttagggtttacggtgctgattgatatctacaaacaaaagcgctggtcattactatcaaccaatacccgcttggtgttaattgctaccttagtgctcaactgcatcgcatttatattgatttttttctttgaacacgccaatcccgcaacattagcgccgctatcaacgtctgagcagatattaacggcttggtttcaagcggtgacacctcgtaccgcagggtttaataccctaccgattgatggtttgagtcaagattcaacgcttttgactatgctgctgatggtggttggcggtggttcagtcagcaccgcgagcggcataaaactaggcacctttgtgatcctaattttagcgatgcgcagctatttaaaacagcaaaccacggttaccgtgtttaaccgccagctgagcgacaagttggtgatcaaggcactaagcgtcatgatactgtacttatttatcgcttttaccagcattatgatcatcaccaagcttgaacaagggtcgttacttgatattacctttgaggcaatttcggcactcagtaccgtaggtctttcgcgaggtattactggggatttaagtgcgcctagtcagctcatcatcatattgctgatgttgataggtcgagttgggccactaacatttgcttattgttttgctcgccagcacagccaacctttgacttaccctactaccagtattcaaattggctaaaaatctgtaaaaaaggcaaccaagaaaaggttgcctttggactttatttggaatttctaagtagaaattaacttaaattcttcatcttcaaaactagtagcaaaactgtagatacttttcctatcttcaaagagagtgaattttgtattaagcatttccatttcattagtaacttcatcgtatgcttttaaaaactctgttttttggcttttgggcttctcaagcgtaaatagcatgttttgtgcttcaatagctccagcctgaattaatcgcctaacgcgatttatccattgttcaccgtgttctattaatgctaatggttttgtttgattaaaagacaatggctttattgctttagtaatttgacttccttttgttacaaaaggaatatcaatttgaacacccaagccagcaggcaatttctgctgagtataatgcacgcccctgatattatcttttaaatcttgtcttagagccttaaccatttgctgttcgcggtactctttagtcacaaagtttctggctatatacttgttatatagctgttcaagtgcgatttgaggagcttcatgcagtacagctcttgtctcactaaaactaacaatcccttccctgaaccgagtaacttcttcaagcaacttaacttgttgttcgccataaaacctagagcctaagcttttcactcttgttaattctttttcaaaagtaactaaagcacttttataaagctcaccgtttaaatcgtcaaaaaattctgtaactcgaccaaagcttttaggtgctaatttgtagtcaacaaaacctgtttttggagagaataataatattccaacattggcaaattcttgtgtttcactgaaaggcataaaacgtatgattgagtatttgcataaatttttcatcttatatcctcccaaaattttgccaatttaaattgttttaatactacgattatttcactctcaatgctatctaaatcataatattcaagccattcttcaggtaaagagtttatgacagcatcaatattttttaatgaagcctccatcttatcttcgtactcaacccggctccaaagtggtaactgcggatcattccaagctgacctgcctaagtgtaattctttatgcttctctaaagaaaaattaggttcaaaagacaaattatgatcgagtacataaacttctttttttaagggctcatagaacagatttggattacctccaaggcttgttagattcctatcatcattttttatccaataatcaaaaatatagagatctcttaaaagttcatttgataaaaattccaactcagcaaatgtaacatcttgaatattaggtatgaatctagaaccaaaacacataccaggaccaagatcatcatatccatattcaacaagtgcatcatcaacatatatgagatcataatcagggttaggtaaaccaaaacttctacataaatgcgcagcaatccactctttaaccaaccctttagctgtagcacgagcaccttttacaatgtattgctcatcattatcagtcctacacaaaaatggtgtcgtctggccttgtttaaattgtctgacaatttccgtaacagctaacatttatatccttaaaaactcaaagccttatatagaaagtataattttatttcgcgaataaactttatacacgtttttgtatatttcaaactataaatatttattaaacattaatctatccgctacaactgctgtagcaagcttttaatgtcactgtagcgttgctgttcgcaaaggccaaaacctgatagttgcctgactttattacgagtaaataaaggcacgctcatgcccgctaaaaagcggcactgagtatcgatgctcacatcactaatccctttagcggctaagtgctgtttaagctcagcaactttactggtaatcacattttgctcaggcatttgatgcactaatgaataactaatttttacctgatggcctctacatactgaacaatggccacattgctggggtgcattttggtcatcaaaatagcgggctaagttataacttaagcagctatctagctcaaaaaagcgtactaaagtggcaatgcgttttatttctgcctgctctttttcgataaaatattgatggagttgctgtgctaaatcagtgtgatttattaccgagttatttacatcatacacttgcgtgatacgtttagtttcaagggcaatatgacctttttcggccaaataatcgagcgcagcaaccacgcgctttctatcaacttgagtggcacgggttaacgcatcaaaattaagtgtgccccaaattttcttaaactcagtatgattgaatacctgttgtaaaaatgcttgtcggtcagcatcaaactggctaagtagctcgttttgctccgttaaaaacttatatttaaaatcggcgtagtaggcatataaaggcgtaatagccccttgcatttctaactgcaccagtaaggtttttaacgctaaagcacgaatattactttcgctcgataagctgtactcttgcatttcccactggttgttcgtttgctcgttacgaatgttattgatgacatagtcaatcccactttgctcgggagtgtcggcataaacgaagttttcaacggtatttaagccatcaaggtttgctagggtaaaacagtttgatggcgcaccatctcgccctgcgcggccaatctcttggctatagttttcaatcgattttggcaaatcatagtggatcacaaaacgaatatcagacttatcaacgcccatcccaaaagcaatggttgccacaacgatattgattttacccgccataaaatcatcttgaatttgccagcgtttatcatcctcaaggcctgcatgataagccaccgcattaaagcctgctcttgccaagccttctgctacttgctcagcggtatgttgtaaggtgacataaacaatcccagccccttgttggctggctatgatacttgctaattgctgaggcttttcttggcttgcaacactaagcactgataagtcgaggttgctgcggtaaaagcccgtctgtactacacattctggggcaatagcaaaacgctcacacatatcgcgctttacttttttagtggcagtggcggtaagtagcaataccaagggtatattaagctcatcacgatagcgcggcagttttaggtaatcaggcctaaagttgtgaccccattcagatatacagtgcgcttcatcgaccaccagcattgaaataggcacttgtttaataaattcacgaaagcgctcattcttaaagcgctcaactgagaccattaaaattttcaccttccctgttcgcacatcactcattaccgtatggctttgctcactggtttggcttgaatcaaggcttgccgcgtaaatacctttgctatttaaaaagctgatttgatctttcatcagtgccaataatggcgataccactaaggtcaagttaggtaagtgcaatgcacttaattgatagcacaaagatttacccgagccagttggaaaaattgccaacgacgattgctgatttaatagctgctcaatggtttgttgctgaccttggcgaaattcattaaagccaaagtattgattcaacgaagtgtgtagtggtgtactcatcctgatccctcactgtcattccctttttcaggtaatgataggtctcttactgcgaattagccatactaacgtgtttggctcaatctcccaaggtcattcatataactaagttaactacattgttcttaatgggtactgacaaaaccatcaaaaaggcgcacaatgggtgggttgccatggggtattgatggatggatttgcaatacctaagcgctttttcgcaagagtgtttaggtattatacttttgagggcaacgtaatgattaaccaacctcctaaaatcgtgatagtcggtggtggcgctggtggcttagaactggcaacacaattaggacacaaactcgggaaaaaacgccaagcagagatacttttaatcgataaaaaccgcagccatatttggaagccgttacttcatgaagtagcgacagggtcgattgatgccgatttagacggcgttgtatactcagcgcatgcagcaaaacatcattataattttcaacttggcagcttttgccacttagatcaaaccaacaaaacaattactttaagcgagttaaaagacgagctcggccaccgtattttacctgagcgccaagtgagttatgactacctagtacttgctataggcagtgtcagtaacgactttaataccccaggcgttaacaagcattgtttctaccttgattcaaaccaacaagctgaacgctttcagcatgccctactcgataacttcacccgtttacaccaagatgatgatccacagcattctttaaccattgctatagtcggcggtggtgcaaccggggttgagctgtcggcagagctttatcatgtgtcagacatgctaaaaatgtatggccttaataaaatgactgctaaacgcttacacattgatttaattgaagcggggccgcgaattttacccgctttacccgagcgcattgcaaattcggctaaacgtgagctggttaagttaggagtaacagtacgcgaaggcacgcaagtaaaagaagccacagaaaacagctttatcaccaaaaacgatgaacatattaaagccgatatcatggtttgggctgcgggtgtaaaagcccctgatttcattaaagacattggtatttttgaactcacccgcaataatcaaattaaggtgaatcaatacctgcaaagtagtgttaacgacgacatttttgtaattggcgattgctgcgcatttacccaagaagatggcacacaagtgcccccaagagcgcaatcggcccatcaaatggcacaatgtgttgaaaaaaacctaatagccacactcaaaaatcagccactcagtgcctttacctacagtgatcatggctctttagttaatttgtcacgctacagcacggtaggtagtttaatgggtaacttaaccagtaatagcttttttattgaagggaaaatagcgcgatttatgtatatttcgctctatcgtatgcatcaacgagccattcatggcagcgcaaaaacctttgcattgtggatcagcgaaaaagtactgcgcgttgttaggccaaaaatgaaactgcattaggctacaagcaaaacatagtcgacaaatcagttgtttgtcggctatttatgctcttcgtccctaagtcattgacatcacaatataaagccatacaatttctgcaagttaagtccatggattgaatatgaaaaaaggtatttcactcacagtatttataggcctttgtgcagtaggaacctacctgtactttgataaacagacccaaagcgagacagttactgctaaattgcccatacacactaataatgttgctagcctgagctccgtaactgaagatgtaaataaacaaaacaccagcaaagcatcagctctaaaaaagttacgacttgcaaagcttgagtgtgagcaacaaagtataaaagccacgcaagcggccactgatcatagccaaattgatgctgctcttaagcaagcactcaaagacggtttacccctctcagaaattttaagttattcagaactaaccaaaatatcttatcgctcatttgagtccttactgataaacgcaattaaaagtaatgccaaagagcagtttcagtatgcagactcaataagtatattaaaaaactggcaaggacttgaggttgttgattattttgatgccgacactgttaaaaaattaacatctaatgctgagtctctgaacatgaatacccgttcaatcatgttcgacgtaccactcccagagcaagtaaataaaacagcgctatacaaattattagataacactgataactttaatacgtatttaaaatcaccttttcaactaggtccatcggcacttatttcgccgtcaatcttatttattctaaacgcgcatagtttaactgagacagaatttgaaaatgccatatcgacaaaagactttacgataaatgacatagccattgccataaaaagcaacttacccaatacgtatataacagcattaatagcgcaaacggcacagttaagcggtgtaccaacagccatgagtgataattttattcatgagcagctctatttaaatctggctgatgttgcagtcagtgagttcaacgtgccgatattagagcttttgaatgagcgcggtattgagccaaccaatctgcccgatgtattcacggcgatggatatcgctcttgttaacttaaaaggtagctcaaacagtcaagtacaacctattgaaaacaaacaccgagagacattaaagtaccttaaggataaaggctacaaagcccatggcgagcatgtgagaggcacatcagaagatcgcttgttgatgtttaagtcatcacttttaccaaacagcttattgttcgtaggtgagcaatttgccgcaaaagcatttgatgaattaaacgatattcccctgattgcaaacaaagcagccttcaagcatcaaagcaaagatgattcagctatttcagacgcgctgcgtgcctacgaaaagcaaaagcaacaatttaaacccgctgatgaaacgtgccaacaggtagaacaagatttaagtattttagaaacgattaaaacccgctcacaagcaatggatgaaataaaacaactcgaagcgcgccaaggcccattgaccgctgacatgttgcaagagattgaccccatgcttgttcattactggcatctcatgcattttcgtgatttaaggcaacaaaccccttatcaaccagatgcctttaaagaagcaattaacaataacgactttaatgccctcgcaactattacgcagggtgccaaactcagcacgcaccaaacgaatttactgcttgcaaaaaccttagaaaatatcgaacaaatgaacgctatttggcaaagcagagctaatccaactccaccaagcgccctttacttactgaagaatcttccactatcagattggcaatcattagccgaaaatggttttgatttttcgttaacagatacatttgacatggatatgtatttttatgcgactgatcactcaaataaagcaattgagtttttaatcaaattgggagtaccacacgacttttcaaaaccaggactagatattcttgatcaagcacttgagcaaagttataacacgcaaactcttgttgactatatgccaaatgcactcaagctcgttaaccatttcgagcaaaatcattttagccgggtacaacgactcaaagagctcgctccaagcgtctatgaagcgcttattcaacttgagccaaaactcacacctgctgaaggtacactcatgaataactatcaatatagcgctttataagttcaatacagagccctaaaaacaaaaattaacctatctgtttaaagttctagtgcgtataatacgcactttttgtggggcgcaaaaattgaacattgttactctgagtgtattatcacttgctatgtctaccgatgcatttgccgcatcaatcactaaaggcagtacactaaaaagcccgcgcgttttaagtgcgattaaattgggtttgatcttcggctctattgaggccattgcccctgttattggctggctaattggcagtgcaggtgctgaatatgttgaagcctatgatcactggattgcttttgtgctattggtaggcctaggtgttcatatgttgcttgaaagccgtaaagaagatgacgatgaagacgatacattaacagcaacaaataaacgctcgttaatggccaccttacttactgctgttggtactagtattgatgctatgacagtgggtatcagcctcgcattcatgaaagtaaacatttacttagcagccgccatgattggccttgcaacaacgataatggtcactattggttcattacttggcaatgtcatcagtggctgggttggtaaaaaagctgaagcgattggtggtatagctctagtgttaattggctgcggtattttgtacagtcatactatggcttaatctaacaacgcatcaaacgcttctttgggcattggtttataaaaataatacccttgcccaagctcgcagcctaattctattaaactctctaaatgtgctttttcttcgattccttccgctacaatctgtaaatttagagtatgcgctaaacttgtaatcgttctaacaatatccatactttgcgtatcagtgagcatatcgcgaataaatgactgatcaatttttaacacatccaccggaaacagttttaaatatgacaaacttgaataacctgtaccaaagtcatcaatagcaatcgctaaccccaacgaagctaggttattcaacatacttttgatttcttcgaaatcatgcatcagtgcgctttctgttacctctaattctagcaactcacttggaagccctgtctcttggagtgtttgagcaacagtattgcaaaagtttttgtcagtaaattgtttcgcggcaatatttaccgctacttttattttatagcctttatcagcccaatctttggctgcagcacaactttgttttaaaaccgataaccctaacgcatgaattaagcccgtttcttcggcaagcggaataaaatccagtggcgagacaaggttattattctcatcccgtaaacgtactaaagcctctacgcctacaatttcctcactggcgagagccagcttgggttggtaataaacgtctatctcttcgtgttcaattgcatttcttaatagcttttcaatgctttgacgctgcttaaattgatgttctaagtcgtcagagtaataacaaaaccggtttcgcccttgttcttttgctctgtacatagcagcgtctgcatgagtcataagctcttctgcggtagatgagtcgtttggattcatactcacaccaacactcacagacaagttataatcttggccatcaatgcgaaaaggcattgccatcgtatttataatttctagagcaatactatctacgttacttgtcgattttacatcggggatcagcaccacaaactcatcgccaccaatacgtgcgagtgtagtatttaaatcaagcaatgactctagccgattggcaacatgctttataatcaaatcgcctttatgatgccctaatgtgtcatttaaatatttaaagtggtcgatatctatcaacatcaaagccacactttttttcatgcttaaagcaactttacacgcatgaaccaccctatcatgtagcaaaactcggttaggcaaatctgtcaataaatcatgatttgccaagtgggtcatttttactgccattgctaccgactcactgacatcatgaaaaacgatgatgccaccaataatgttgttttcaatatcacgaataggagcagcagagtcttcaacacgatgaacacggccatcaaaaccaaccaattggctattaagggccattgcaacaatacgatgctcttttaaagcaactaaaataggattcactaagcgtgtatttgatgatgcatcaaccaggttcataacttcttcaatatgcctgccttttgcgtcatcggcatgccatcccgtcaaacgctctgcaatggggttcataaagttaattattgcgttgttgtccgtagcaatcactgcatcaccaatcgaattgagcataactcgtagacgttctgattcattcgatagctgtttttttgtattggtaatagaggtgatgtccgaaagagtaagaatgacaccagtaacctcttgctctattacttttaaatttatttgcgctctaacatattcaatcctattacgaggactgggcaactgtatatttaaaacttcttgctctatgccttcagttaaacaacgatgaaaagcctcatacagcttttcaggtaatacatctttagcgaaacaaccaagcatttgctcactgctttttgcaaaccaatgggcggtttcatcattactaaataaattttcttctgtttttgaccagtaagatatataaacaggaacttgctcaaccaatgttgaaatatcattttttgctgcaagaatttgtctttcttgatgtttgatttttaattgattttgtactctcaaacgacaaatagttaaatcgacaggtttaatgattaaatcgataccaccgcttgcaaaactctggtattcaaatttttgtccattgtgtgaagttacaaatatgacactaattgattgggtgatagggttgtttttaagctgtctacaaacctcaaagccatccatatctggcatttcaatatcaagtaaaataacatctggttgaaataaaaccgcttttttaagcgcctcagcgccattatcgacacattcaatctcaccaaggtcgtttaaagcctctaacataatcattaagcttgttggctcgtcatcaacaaccataattttactgggtttgttctcttgatgagtaaaaagcacttccgtcgcctcttttaaaatcattaagaaaactctagtcctttattattgccatcgccaattaaaattattttttaacaccttttactgtaggaatttaaaaaatgcggctacgctatatacaacaactagaggaaacattttgcaacctttggcagccaacgatttaaaacttgatgagtctgttattttaatagttgatgacgaaccaattaatacaacagtgattgaaagtttacttgctccgcattttaaaactttcaccgccgattgcggtgagagtgttttgcccatgtgcgagtctcactctcctgatttaatcctcttagatgttaatctaggcaacacaaatggtttagatgtatgtaagcagttaaaagcacactctcagtacaatcatatcccggttatttttattacctcaatcatggatcttgaagctcaggataaatgctggcaagtgggcggtgttgattttgtctctaagcccgtatacggcaatatcttattgaataaagttaatgttcacttaaccatcaaaaagcaagctgacctgctaaaaacaatgtgtgaacaagacagcctcacagggttaaataaccgacgctacttacaaaatacacttgagcaaaatattcgtttagcaaaacgttatgataatcctctttcggtgttaatgatcgatatcgattggtttaaagaatacaacgacactttcggccaccaacaaggtgatgagtgtttaaagttagtcgctcaagagattaaaagaagtgttaaccgctcaaccgacacctctgtgcgttttggtggtgaagagttcttatgtgtattaccagatactgatatccaaggggctcagtatatagctcataaactattagctaatattaaagcgttaaatatcacccacccgaacccagaagcgacaacggtgtctataagtattggcagcgccaccttacaggggcacgaaaacttagattctgaacaattgataaaatgtgctgacaaagcactgtatcaagccaagcatcgaggcagaaactgcagcgtttgcctacttgctgaaatatcaatcattgcctaatctcaatgtaatcgagaataacaccttataactaagactaagacaatgtcatacaactttgcgcgtaaaacctctcatcaatattcagaaagtcgtcatctattttattgggcttttttatttattatgacggtgttgtgtttagctatttttgtatttgaacaacaattagaaaaagagctgactacttcgattaaatcacgtcttgaggattcaagtagtacagtgacccttcaagtccaagaaaatatcagtaaatacaaaaatgacttacattttctatactccacaccgcctattgcaggactcgcacgagcagcggcaaataatggcaatgaccccctcgacaacacgacaactgcacaatggagaaaacgacttgaaacaatctttgttgctttcatacaggcaaactctgagtttgagcaattacgggttatcagtactcaagatgccggccaagaattgattcgtgttgatagagcagccggtggcatcgtcgtaaaagcgatcaaccaactacagaataaaagtaatcgtgattactatcagcaaagtgcgcagctttctttgggtgatatgtacctatctgccattaccttaaaccgtgaatacggtaagcttgagtttccatacaaaccaatgttgcgacttgctttacctatttttgatgaaaacatgcaacgttttggttttattatagccaatgtaaatacccaaattctgtttaactctctgtctgagcttgttcaaactcctcacagcttaattctcacagataatgagggttactttcttatacatccagatcaacgttttaactttagccgagatcttgcgccttcgaatcgctgggataccacttatcaaactaatactgaaaacctcggtggcttagtgagtattaacgctacctatgataataataaaaagagtgaagtgttcagtcgcagaatcccactttcaggtgatactgaaacaggctttataacatctcatatcttactctcccatgacgacattgcaaaaatccgcctcgagcgacggatcagtacgtatgttttctttcttggtgtttcactatttttgctttttatgttggtgtttttttatcgaaacctcaagcgcaatcaagagcttgctcaggcaagagccgtatcatccgctataattagtggctctaaagatgcaatcattagcataaacaacaaaggggttgttaccagctggaataaagcagcaacaaatttatttagctttcaacgagagcaagtactcggcactgacattaatacacttaaacttttgccaaatatcgatatacaaaaggtatgtaccgagttaagagatagtcgcaagcgatatgaaattgacattgattttacacctcagtcacagactagctgtcacttaacagtcgcattttctgccattattaacgagcatcaacagcaatgcggcacagcaattattattcgagataacactctcgaaaaagaagctagtaacaaaataaagcaagctaacaatgagctcgaagttaaagttgcaaaaagaaccgcacaacttgaaaaagccagccaagttaaaagcgcctttatctctaatatcagccatgaaatgcgtacaccattaaatggtattattggtactctgaatttaattaaacgcgaatcacttagtaatcaacaaaggcattacttagcaatgactgaggtaagtgtgaataacctcaacgtgttgataaacgatattctcgatctatctaaaattgaagcaggcaagttagaccttgataaaaaagcgtttaatcctattaagttttttgaaagcttagctggcagcatggccgttaaagcacaagagaaaaacttagaatttatattagacatcgccgatttagaatttaattctatcgtcactgaccctcatcgctattcacaagtactaaccaaccttattaataacgcgattaagtttaccaaaactggttatgttaagttttcagcatacacccgtaccattgatacaaacaccgccgtattaacatgtactattaaagactctggctcaggtattcctgacgaacatcaaagcaagttatttaatgcatttacccaagcagatagcactattgcatcacaatatggcggtacagggcttgggctttcaatctgtaagcaacttgcaaatttactcgatggcgaaataagttttgagtcaatcgaaggactaggtagtacatttgagttttcgattcgcttaaaaattaatgacgttcaaaaatcccctagcaatcagcgtttaagtggcaaaacatttgcactttttgttaagcacccagagctcgaaagtagtatggccaaactcataaacgtgtatggcggagaactatccaatattgacattgaagactttgaactcactaagagtatgcctttcgaaacccttattttagaacccggaaacccactattagctaagttagatagttattgtgaaaatgaatgttcaagctcattaccatttaaattagttgtgctaataaatcctacagaaccaccccctcaggcaagattttgctctttcacacgactatctaaaccagtgcttatttctgagtttttactaaaactcgccgatgaacgagttgcacaagatctgagtgtgcaaaatcaaaaacgtcgagatagcgatgcgcaaacacacattgacgccagcgtcgaaggtgcaaagatacttatagtcgatgataacgagataaacgcagcagttgctaaaggtactttgacaagtctttcacttcgctttgaagtggcttcaaacggtagacaagctgtagatattttggcaaatacagatgtaaatgatccttttcactgtgtgttgatggactgtcaaatgcccgtattaaatggctatgatgccgccacagaaattaggaatggagctgcaggagagcatcatattaatatacctattattgctatgacggcaaatgcaatgttaggtgaacgtaataaatgtctaaatgcaggaatgaacgactacataactaaacccattagtgctgataaattaatcatgacaacagcaaaatggatatcatcagtgtttcctaaacagccacacccgaagaacaaagctcccgaaaatcaggcgcaagttaccacagcaccagaacatagcgagctaattaccgacgaaaaaattcattggaacaaagaagctgcccttgcccggttgatgaataacgaagtgcttcttaataaagtgtgtaagatgttcttagacagttctaatgaaaaaataacgcagttaatcacagtaattaaagagcaagattatcacggtattgccacaataagccatgccctaaaaggcacctgtggtgacgttggcgccactaaattacatcagcattttacagagttagaagtactcgctgctagcaaaggaaatacccttaaagatatccaacataagctaatcgatatcgaaaaagattacgaggtattactcagcatattacaaaggcacaccatagcgagagtaagttaataaataacgataaaaaaatacgggctttgtcagaacaaagcccgtatttttttatcgcgctatgaatttgtcttctaattttaataaatgctctgtatgttatgacaaaccactaaaggaatgacgctatgaacgctaaaacgctgattttcaactttgatggcacgggcagtgagcctcgtgatgcagaacaatttagtgccgcacacttcaaagaagacgccagtatctcaaatattctcaaacttcatttactgtttggcggtgcactaaatagtgaacctgagacccccttcccgagccagcttagtttttattaccaaggtataggtactcaaggtagtcgctttaagcgtttatttaaccaagccttagctcctagaggtgatgacgttgccagcattttaaaccgtgcaatgaatgactttaaaagctactacgctgtgggtgataaagttttattaaccggttttagccgcggtgcggctcttgcgcgacgctttgcaaaatgccttgaaccactgatcagtgacgacgtatacctttgtgtatttgacactgtggcatcaattggtttttcaaaagtaactaaagcaacccgcggtgcagagcacgttatttttgaaaactacacgctagcaagcaatataaaatcagcccttcattgcgtggctcttgatgaaaagcgccgtgcttttgagccaacattaattaacaaagccccccatgttgaagaaatatggtttgcgggagctcattcagacgtaggtggcggttattatcgtgatggattagcagatatttgcttacgttatgccattgagtggttgattgaacaaagtgtctcacttaatctactgacaagcgcagaaataaactacaacagtttgctcccagctgagcatcgcaatttgatagcgcaagatgatgtgacagtaaccccagatccgcttgctctgagccatcagcaaaattatttttggttcaatccgttattcaagcttgtagatcgcgagtgttgcgtgttggttgataacgaacaaagcgaacacccacctactattcattacacggttgcagaacgtatcaatcgcttaacaagttaccgtcctgaatcactaaagagccttaactatgatgtactttacagtgatgaaactcgtttaagttttacaggattaagcccacatattgcacttgataaacaaaatatgacggtacttagcatagatgaaagtaaagatgtatttgtgtatggcgccgaaaagtacaatcatacaggcttaatgttagagcaaggtggtacctatcgattcactccctacccagaacaaatttggtatgacgatggtatcagctgtgggcccggcggttggcatcgcgacaatattcaacttggagtgaaagaaattccaatggcagtgcttgaaccatttagacgtttgccacacgcacaatggtttgcgctgattggcgcaatagacaacaacgacgaaaacttgtttgagattgccgaaggtgccgatattcggattgcaaaatcgggtgagttttgcccttttgccaacgacctaaaccgcttttatggtgcaaacgcgggccgcataaaacttcgtgttatgcgtttaggttaatttgtaacatagcgagcgataatttcttttatcgcttgcttattcgacacaattgcttggctaatcgcagccctttcattagcatccaacgttactttactcagcatcaaatacacatcgttattgtgtattatataggggtgaagggcgataccactgtgttgattattttgaattaaataaagccctgctaattcgtcatcaataaaaaaatcaacccgcttagcgctaagcatagcaacgcgctgacgtaacgaaggaacagtgatcagctgcgatttatattcttccacagtactaaagtgtgaaaattctgagccataataactaccgctgtttgataagataatttgttgttgttcaagcaagccttgcagatcaagcttttctaaaaatggtttcggataccaaaataaccgcatgacttctagacgataaggctctgaaaaataactaaatgcatctcgttctttgctataactcgccgcaggcaacagatcaacattgccatgctttagttcagcaaagccccgttttgacgaaggcataatgacgtatttagcgcaaaacccagcttctttaagtactaagttaaccacatctatatcaatacctgtgagctttccattttgcgtaaaagtatacggcgcccactgctgactaattcccacttttaaggttttatcgcagctaaaagccgagttgcttactacagcaacaacaagtaaaaacagcgcttttaaccccatcaacccaccttagcttaactacctacagaccgctttattcaagtatggttgataatacctgaaagaccagtgtataaaataagaaagggaaagttactagtttcaagattagagcatgtagtagcgattttatatcgcgttttatgttgtttttcttgtctcgcaaatcgcgttaatcttcgcggcataaagcctctgctacgtgggtgtagtgcagaagctctcttgctgtgtctatgaataggaagggcttcatccgacaggctctgataagcacgaagcagacataaaaccacttctagtaaattgttagctgtacttatcaaagccgaacctaggtttctatttcggggtttattttgctaataattaggtgttgtttttaatcaaaacagttggctacactttttacgattttaagttagccttaggtagtgtaaaaaaattatgtgaacgcaatgaatggtcatttcattgcgctcagagggtggcaatatggtttagcatttaccaaggtaagctactggcttacctagttcagttaataaatatgtggttaaactaaaacgtataaataaccccaacgcccacttcagcttcgtaatcactgcgtgctatagggctatctctgacttcactactaaaatactcgaataacgcttcaccatagatttgccaatcactgttgagattttgtcgataattataatcaataccaaaagagcgcaatccaccacttaaatttgtttcttctaggcctgatgacgctgattgcatagcatcaacaccaaagccattattggcgtattcgctgtcgtgtactacaaacacaagattgatttcagagcctgtgccgtccgtttgctcaccgaatcgacgtccaacaccaaataaggctaaattgccgttttcactggcaacgaaacgactaactaaccaataacgccaatcttgggtaaatgagcggcgagcttgtaaaactagttcatacccttcttcttgattaccaaggccatctaatctgccatcgtcagaatcactctcttctcgaccttcttcaaatccaatcaaagcatctagcagccattgatcattaagtaatcctcgccagccaaatgcttctcctgcaaagtaataaatattatcaccactgcgccattgcacggcaccggctggctgtgcctccagtccaaattcatcagatccttcgtaagcagattcatattctaaccccacacctaagccaaatgcccagccatcttcacctttggtgaaatcatcaatagatggaaggggaactaaaactgtcttatcttcttgagctaatgctgtgttattaaaggtagtgtgtataagcaataaaacggctaaatatataaattttttcatggtacttattctgtttattaaatgggttgttacataaacaattttacgaattcgcttaggatatggttcataactaattttgtattttttcttctaacccggcagcaaactcgtagcagcacatttacaccccgtcataacctcttttatcgcatctcgctaattgctacctacaaaaaagcagccataaggctgctttgaagggaaatcacattttaatgatgggcataaaatgtggttattacacttaaagtgctttccatacatccgcgacacctggctcgtctccttgagtccaccatttcgcttcgtatttattgccttggtgagtgacttggtcgccaccgttgtagatacccgccgcttgccacacaacatcaccattaccgtcggttggttgtgaacttgcttcccatgggccacctaaatcagggcggtcaccttgtgtccaccacttagctgtgtactctatgccgttgtacgttaccttatcaccacctacatagattgcagtatcactccagctggtttcaccatctggcggagttgttgtgccagaatctgtcacggtgacattaaagctcactgctgttgcagtttgaccatcacttaccgaaaccgatacaacatagctagtatcagcatcaacgctgcccgcttgtaaactcacatcagcacctgagcccactaacgtcaagcctgctggcactgtccagctgtatgaaagcgcatcaccatcagcatcagatgccgaaaccgctacagccacactcgcctcttctgccacggttttatctgtaattgccgcaacaattggtgcttggttctcgcctgtagttggtgctacaacattcacagtaatgttacggcttacacttgcctcaccatcgctcacagtcacagcaaccgtgtattgcgtatcagcagtcactgatggcgctgtgataacaagggtatttgaattttcacccgttactgttaacgcgctgtcagcggtccagctaaagcttagcggatcgttatccgcatcagttgccgatgcactaacagatacactttcgcccgcattaacagatacggtgcttgatacagatagcacgggcgctctattgctaggctcagtgactgtgccaccaagtgcttcgtgcattgcgttgaggatatcaccattatctgcgtcaatttcccatgcaaacaggccacctagattatattgattaacataagcaccttttgctaaaactgatcgacggttatcgtatgtaattaatttaccgttactacggttccatacataagcggcttcggcttgttcgtcataacctgtttcaaagccattgatgccattttctgcagcgcccagcatgtaggttttaatgcctttataatcgataacaccgtcttcccatacaccttgcgctgtagtgccttttagtttgccattaccgggggctgtcattgggttatcagcgatagtcgcgttttctggataaacgccttcccaaccacgaccatacatagcggtgcccacgacgattttcttcgacggtacgttttgcgcaagtagattttgcactgcgttatcggttgtgtaagcagggcctttatatggaacgccttcttcatcaacacccgtgccatcacactgaccaacacggaaatgcgatgaacaataaagcgcagcctgatggcccgttacattgctccatgcaccataatagtcgtagctcattaagaaaatgtaatccatatattgttgagcttgtgagtagtcgacatcttcaattttgtcgtaacccgcaccaatcgctgatgttaactcatactcacggcctgtctcggcttcaagcttatcaagcatcgcgcgcagctcttgcattagcgctacgtatgctgggccgtcagcaactgggtcgcctaagtttggattagcaccctgaccacccgggtattcccagtcaatatcaacaccgtcgtagaacttccacgttcttaaaaactcttccattgatgccacaaacgtgtcgcgattggctttatcggtaaagtaagcaaatggatctgataaagtccaaccacctactgatggtaaaattttcagatcaggataacgctgctttaacgccattaactgcgaatacgtaccacgaattgggtcattactatcaacacctggtagcgctttttgaatcgcagcccaagggtcgtggatcaccacttcaaaatcttgcgagccagcacaggcagtatttaacgcgtttttaggaccgccagttaatgagtcattaggtccacaaattggaataaacccatacaagatatgacttaggttttgcgctggaatattggttacatcatagtcacggccataaataccccactcaacaaagtaggcaccggttacaagaccgtctttggtgccaatatcttggttgtttggatcataatccatctgtaatggcgctaagtgaccgccatctgtatcggcaataacaattggcttaccttcactgcgagcacaggtagtaccgccttcacatagttctaaatataatgtgtgacgaccggctttatcatacggaaagctaataacaccacttttggtgcctgctgccagcgagccttcattaaccagcatatcatcgaaatacactttgtagctgtcgccgccatccccactccatgcgttccattcaatgctaatggtgactttatctacacggttcaccaagctcttatatgaacctgtaccctcaagatcaacctcaacaaatgagtactcttgtggctcccaaataatggttggtgttgaaggtgctgcattcgctgcacttgcaaagagtgcaacaccaatggctgcggttaattgttttatattcatgattctctcttatctgtttttatatagcgttacgctgttattgataaagtttgaactacaaaactttagatttctgtccatacttggctggcacccggtacatctccttgggtccaccactgcgctcgatagcgctgtccttgataggttacttcgtcgccgccttgataggctttgccgctgttccactcgattgatgcactgccagattcaagctgccatgcatcactactgtctggttgtgcgccttggttccaccatttcgcaccgtaaacgccgccgttaaaactcactttatcgcccgtgttgtattggcttgtgctattccaagcgggcacgctcggatcaacaggatcagggtcgattacagtgctattaagcacagtcacgctaaaacttacttggcttgtgagctcgccatctgacaccgatacactcacggtgtaacttgcatcagcatccacagcaggggcagttagcgtgatgttggcatcattccccgtaaagctcagtggtgcaggaatatcccagctataagttaatgtgctttgttgatcatcaaaggcgtgcaggtgtatcgcggtgctgctgccttcttcgacttgaaggtcatctggttgatgaataattggcgcggtattgtcaggtgcagcttgtacgcttaatgcaaagctgtaagttgtattcgttgtaaagacttgatttatcaataaatctgtagcatcaaaggcaatatctccagcgctattttgcacgccaatattaactaagtgcgcgtaattaaggtttaacagtgctgcaaattcagcctgccaattagcttgattatcagttgtgatctgcatttgttgagtaagtaactcttgaccattttcatcaaataaccgcgctgacacactaccgccaacctcgccgttttgcccttgacgaacaaagtagctgattgctgtccaatcgcttggctctgtcggggtcgcatcgttgacaatattaatatcgctacagttgtagaagccttcgccaccggcatcatctcgttgccaacgcgtatataatatggcatcgccactgcgcccttgtggaatagacacgctcatttcatagtaacggtcgttgttagcatcaatgctaaaatcaagattgccgtactcttcaacaagctctagatcatcccaagtaagcacttgagtcgcactatcaaagcccggttttgttaagtaaaactgccaaaaactcgggttatgcggcgtactcgctaaaaagcgcactaaaatatcgccatttgcattaggaataacctcactgcgttgccaatgcgctgaaggtaaatccataccgcgtttttctgggtcgcctgcggcacataatcggccatcaggtacactttgttttactgcttcaaggtcagtgtagttaaccgtatttgccgagtattcaatatcttgcacaaactgcacatgtcctgcttcaacaaatgctgcgcggcaagcgaggttagggatccctgtgccatcagcaggccaccagtacccgccatcagcattacaaaatgcttggcgtgccttcgggctttctaagaatccgtgggcattcacatggcttgatgcacaggcaatcagcatgctggttgccactgccgataaagacaatgcctttgatttcattactttcattgttgttctcgctgtagaaatgcggagcaaagtccttgctccgcttagttggttaaagcgtgcaactcaccgtccagtcagcagatgtgcctggctctgtgctcgtccaccactttgcttcgtaaatcacgttgttgtgattcattaggtcgccgccaacagcatgacttggattaccagcccaatcagtttgcggccaatttggatacactgggatgcttgctacatcaacaccattacagcttccctcgccacccgtatcaccaccggtatcaccgccagtatcaccactgccggcagtgccatctggtagcattgggtattcgtatttaaaagcgtaggttttgccatttttctcaatagtgaaattagttggccccgtaattggcatgtagtacataacttgggcctcaacggtttcacctgtgttaaatgacttttcgataccgccccactcattcactaaggtgattgaaaaacgatggaactcattttcaaagccgccgatattatcgccagccgcattagagccattcgcttcaacagccataccgagcttttcttgtgcattccaatttgatttgaaaattgcagaggtagaaacgggcacatcaaagctgatttttgcaccgcttaagtcgatatctgagttattggtgaatgcgaatgtaggtgaaatcggatagttatcatcaccaattgggaagtctttcaccgtaaagcttacgtcaaccgcttcgcttggaatggtaaaatcaacattaccttgatgagtgttgtaagccacaccactttggttaaatttatcgtaagcaagtgtggttaagcttgagcccatgaagtactcacctttcgctgagtcataatcatagtcaccggcaagctcccaaaacatgatgccaccaaggccattgttgataacataatcaactttggttgccattgattgctcatcttcaattgataagaaaacctttttctctgcattccaaagccatggagcaaccgccacatcatcgtagtaacgtgtgtaagtacccgttaatacatcatctgcatcggtttctggcgttagaccatagatttcaaggtaagatggattaataccattttcgaggtttttcgcatgccatagcgggtttgaaccagctggcatttcttcaccaacatcgttcttatcgtgccatagattatcgatgccaagtgcgccattaccgcattggtttttctcaccaacgccggttcctttagcacattttgattgatcgggtagcgctgcttggccccataaaccattggtaccacccgacacatctttaaagccacgggtgtaatatggaataccaatattgattcgacctgcagagaccgcaccgcggaaataacgtactgcccaatccgtatttaaataaccaattccttcaaactctgcagtggtataaacgccccattgcgctaattcagaatcaaggccagtatcaaacaaggctgcgttgtggcctacatgtgaattccatgcaccatgtaagtcataagacataatgttaacgtagtcgagatacttcacgctttggaatgtttccatgccacgtaataagtaacctgaagatggcgaagcaatcgttaataagtaatgcttacctgccttttcacctgcaatatcaagttcttcacgaagtttttgcatcaatacacgatacgatgcattaagacctgcacgacgtgcattagagataggaaaatcatcagggtggcctgagtcattcattgacgatgggtattcgtaatcaatatcgacaccatcaaaaccgtaagtttcaataaattcaacggcgcttttcgcaaaagcatcaatccccgcttggttcactgagccatcggcattggttgtcatcgtgtagaaaccaccgctatttacgcgagtaccgtcttcaccaaaataaccgccagtttcagcccaaccacctacagagattaaggtttttacatctgggtgttgttttttaaatttattgagtaagttaaagtgacctgtgtaactaaagcttggatccatttcagcgcctgttacgcccggccaagtcatgtttgtcgctgggttgccagcggcatttggatcaccaatcgagaccttgttattaccatcaacatgcgcaaaggcatagttgatatgggtgatcttgtcccaaggaatatcattcactaagtagcttggctgaccattggcaccatttcgccaactcgtaaaataaccaataactcgacgtggatgatcggcgcccattttctcacggccattttcatcatacacgctacagtatggggtattcacacccggtgtttggtataagccttgcggtttacaatcgctgccaggttctgttgcttcaacaacattcacaactttgctttgtgtacccgtcgcgccttcgttatctgtcaccgttaaggtaaatgaaaattgtccaagtgctggagcctgccacgtataacttgaagacgcggcactggcttgatgaacttcagtgctgttttcagttaacgataacgcagttacttggccatcgctatcagtgccagaaagcgcaaacaccacactgtcacccaccgttacttgtgatggtagtgagctaaatacaatgctcgccacgggcgcttggttaaccggctctacgtcatcagacacactcactgaatgtgcgaccgctgtagaggttagccctaaatcatccgttgcgaccgcacttatcagatggctgccttgcgttgcttgccagctcgctgaataaggtgcgcttgtcacaacactcagcgatgtaccatcaacaaaaaactcaacacttgccacgctgccatccggatccgcagcgaccgcatttatgacaacgctgtcaccgctagtaaataaagaaccttctactggtgttaagctgctaatttgaggtgcttgattttcgctgacaacgctgtcacaagcgcccaataaacgccactcttgatcgacaccagatctctccacaggattggtttgcgtccaccacttcgcttcataagcgctaccttgtgcttgaacctgatcaccaccaacatgagtttgcccttgttgccacacttctaagttgctgcaatcaatcgcagcctgtgctgtaaagccgtataaacctagcgacagcgcactcagtttaaaggcattttttattaatttatgcgagctcattcgctccctccgcccaaagtttttataacatttattttacaaatccaactttaaagtaacacaaagcactatcacgtcaagctcaaaattacccataagaggtaaattaccagttgttttttatgtataatttaataaaaaacactaaaaaagaattaattatttatatcaaacagcaaaaaacaaactgattctacaaggcaaaagtgaacacaaaattaacaataaattaaccacaggaagtgcagtacatctggattgtatgaaaaacaagcaaagcttgtatggggaaaaacaaaaataattgaagtatctattttaggtatataacgaataaattagtttttagataaaaatttctaaaaaaattgacttaatattattcttaacgcgaattttaggtaaaaaaaagcaaacactgagtgtttgcttttcacaaaaatcctatttgatcacaacttaattaagcagcgattaaataggactctcgtcctgcatgttttgccttacgttgataagcacctttacctttttttggtttctctacttttgctgtaaacagcttagatgtcaccattgcggcgtacacattgtcgttaattacaccgcgaccagtatcaacttggccttgtgtgcgttgtttctttttgctcattttttgctcctattaaatgtgttgcgagtatatacctagccaaactctacgcaagcgatttttaagaaaaaacaatgatttttttacccctcactttgtcttaagcacttttactaaacatcatgccttgttgtcattttatagactaaattcgcattttgattgcattcactacctaactgctggcaaaactagcaaaaacaaccatagttaattaaaaaaacaggattacgatgactgactttctcttaatcgcctacatttttcttctggccggcattattgccgtacctattgcaagtaaattagggcttggctctgtgcttggctacttactcgcaggtattgttattgggccaacactgacatttttaaatgttgatgtgattgccatccagcattttgctgagtttggtgtggtaatgatgctatttattgttggtttagagcttgaacccaaagcactttggtctatgcgaaaacagcttattggtctaggtggtgggcaagtaattttatctgctgctgcttttacaggtataggcttagcgtttggccatgcttggcaaacagctcttacaataggcttaatattatcgctttcatctaccgcgattgtgctgcaaacgctttcagagcgcgggctgttaaagtcagatggtggccaagcctcatttagcgtattactcactcaagacatagccgttatacctatgcttgcgtttattccattgcttgctttacctgaattagcgcccgcaattgcagataaagcccatgcaagcgaagacgcgcatgctggtttaagtttagtggcaaatcttgagggctggcaagctgcgctggtaaccttgggtatgattgcactagtgatctttggtggtaactacttaaccgcaccgatttttagatttgtcgcacaagcacggcttcgcgaactatttaccgcaacggctttattctttgttattggtatcgctttgatgatgtcattggttggcttatcacctgcgcttggcacttttttggcaggtgttgtgcttgcaaattcaccttataaacatgaactcgaaagcaatatcgatccctttaaagggctattactaggtctattttttattaccgttggtgccagcatcaattttcaattactcgctgataacctcgctactattgtgctattaactggggcactgattgcaactaaaacagctgtgttgttaattttaggccgtatttttgggcttaggggcgcatcactttggttactagcgctggggcttgcgcaagctggtgaatttggttttgtattacttgcttacagtgtgtctaacaatgtattggcagcagcccttgccgaccagttattactagttgtgaccttatcaatgctgctctcaccgggcttattcattctgtatcaacgtgtgatagcgcctcgctttatttgtgagcaagccaagcgagatgaagaagagtttcctgatgatagccatgtgatcattgcaggctcaggcagaatgggtggccttgttgaccgtattttgcaagcaggtggatataacaccaccgtaattgattataattataaacaacttgaagcacttgaacatgttggtattcgtaacttctttggtgatgcaactcgtccagatttactcagtgcagctggcattgaggatgcaaaattactagttgtagcacttgatgatgccgaacaaataactaaactcgtgcgttatgctatgcaaaattacccgcatttacatgtggttgcccgcgctgtagaccgtcaccatgtgtatgaattatggacatacggttgtcgcgatattattcgcgaaacgtacgacagcactatgcggatgggccgttctgcttttgaagcgcttggtattgagcgagaaaaagcccaagaaatggtcgatatcttcagtgaatttgataaagagatgcttagagaagcagcagacgcttacgaaataggcgtaccgtttgaagagaaccaagcctatatcgattgcattaataagctgtttgaagaaaaagagcctaaaattaaacaacaaatgcgcgagatatgcgagcgagttgttagtagttcgaaatagcaaaaatattacaattatggaggaggtgttttcacttcctctttatcttctctttgtgaaaataatttgaaccacagagaacacagaggcgcttcgcgctacacagagaaacttaatgcacaaagaggataagaggcgctgcgctttagaggaaaataactaattggcttaactattatctcgttgttttctcattcagttctctatgtgaatatagatatttgaaccacagagggcaccgtggagctgcgcgctgcacagagaaggtaatttcacaaagaggataagaggcgctgcgctttagagaactccttgtctttctctgtgctctctatgtcctctgtggttcgaaaaaagatctagcaaacagttagtctcgataaataggttactggctgcgtctgagaagaaggttggagaagttaatttgggtttcctctttttcttctcattaacttctctttgtgaaaataatttgaaccacagagaacacagaggcacttcgcgctacacagagcaaacaaatactctcaaagagactgcattgaataggataaaacatgatataaaatcgctgctacaaactcgcatctcgcaaatttttaccctttctccttgctaactaactcaaagctttacagccaatcgatttggatagaaaaagtctttgctatcaatgcatttaattttgcttatgtctgtgtgcaatgggttgattaaataattgtattcatctgggcatagacttgaaggaacttgaagtacggctgcatccatcgatgctaaccaatcagaacctagcgcctgagtgtctgtaatgtagggatggtcatcccatgcttttggcagttcgctcgatactagcctaacaatcttgagatcatcaggtatctgtatagtggtgatactcaagtttgtacttaatatgtcggttgtgtcattcactaatcgctcaagcattgctaaagagcgcgagctcgccgtataaacaatgggtttaccaacaaaatgccaccgcccctgtgcatataaaccaccaagcccagataacgcattagccatgtcattatgaacttttggtgctattcggtagcaaatcattaagctgtgaacccgtactcaagccccattatcactcgctttatcagttcacggccacggatagtatggatcactgactttggctcttgattcgcaaactgaatgttgggcgtattaagccactcattccaacgtttaacgtcaccaaagtaggcaatgccttgcgatgaaatacgtgcaatctctaaagcattttcgctcagcttagcacttaaacgttttcggtctttactgtagcgctcaagtgtacgggtcgtggtgccaatggaggttgctaaaatgttggcatcccaattcagctctttagcgagtgatttaatcgcactgacagttacaccttgtgttgcaacattaatctcatcaattgtattagaatgaattgttaccctaccatcagtaaccacgcctaaataatcagtttctacagcattcattttacacctcgtcgaattcgacacttgtcatttattatagtgacaaatgtcgcatactacaattaaacaaaaaatagcgccgttaggcgctatttaagcttcatttcaacttaggaattaaaaactaaagcttagttttgcgtagtaagtcataccatcaaaaccataaggcaatgcacgtacagggtacttaaatgctttattagtaataaaatcaagcacttcatcttcgcctaactcgtctggtgttacatcaaagatattatcaatacctgccgatagcatcagctcgtcagttagctgataaccaacatttacatcaactaatactgctgactcaaccgtgcttgtgtctttaaactcaccagtaggcgataactcatcaggtaaacctatgtggtcattaccaaagtatttaacgtctgtttcgccgtagtagttaaaacgtagcatgctgttgaaatcgccacgatcgtattcaaatgttagtgttgcacgctcacctggttgaccatccgttaagaaactacgttgtaaatcatcaagagcgattgactcaggaacaccttctggcgcattcacatcatcaatttcggtttcgttaatgttaccagcaaaggttgctgagaagttaccgtcatacaaatcagtacggtatgaggcaataatatcaacccctttggtggttgaatcaaccgagtttgagaagtagttagcttgctgtgcacctgttgcattaagtgccgccaccgcttcggcgctaaacgaaacatcgtccgccgacattaagctgccaagggtaattctgtctttaattgcaacatgataaaaatcaacggtcagtgataaatcgcttgttacattataaacaaagcccgcacttaagttttctgagctctcaagtccaagactatcaacgccaagggctgacggaaaatcagatcccgctgttgcagtgaatgattgcaataacacgccaccagcacctaagtttgtggtgtaagctgtataggcgctttgttgcagtgatggtgctctaaagccagaagaaatcgcaccacgaacagcaaagtcatcggtaatttcatagcgcgttgctagcttgccaatgatgtcatcaccggcatcagagaagtcttcataacgaagcgctgtacttacctgccatgcgtccgtgatcagtgtttcggcattaacataaaatgcatagctttgacggctctctttgtttgacgcttcaggacgtaaaccgttataagcttggaagccacactcagcaaatacgctgctgtcgttaaccgcagggtatgaggtatctgaatttgctaagccacacgcataagacgcttcttcgcccggcacgatttcgtaattttctttacgatattcagcacccaccgacacataaacaggttcactgcgaccaatatcaacaataccatttaaatctgcatttactgttgtttgatcaaatctaaaaccacctgagtaaccacctgaagggccagcatttgcagcaatatcagcatcagttgcacctgggttattcgccacatattcagcagcatacgaggcatttagagtattttttgaggtgaaatcatagctattttcaccatatacggccgaaaaatcatagctccaatctgggtttagctcaccgcgcagcccaagtgaaaacgaaatatcttcggcttcgttgtcgatgcgaggtaaaaagccatcgccatatacttgcacaacgttcttcgctgcttggtcaaagttacggtaaaaaccattgcctaatgccgtacggtttgagtatccaccaaatgagtaaagttcgctctcgccaagtggtaacgccatgttataaaacacagacgtaaattcgctatctgcgttaccttgcccccaacgaacttcgtcagacagcgtaccggctggtacatcaactgagcctccagtatcacgctcagctcggttggtgccatcagcatcacggtattctaaagaaaagttaatgaagccgccttcatcgcctaaatcaaagccacggtttaaacccattgatagggtgtcaccatcgccttcacccgtgctacctgcttgcacataacccgttgtaacacctgttgaatcgtttagcgataagttgataacaccggctatcgcatcagagccatactgcgccgcagcaccatcacgaagtacttcaacgccttttaaagcggtaagtggaatcgcgttcatatcagtacccgcagcaccggcaccgacagtaccatttaaaccaaaaatagattgattatgacggcgcttaccattgattagaactaacgtttggtctggctgtaagcctcgaagagttgcaggtctaaataagtcagagccatctgacacttgcgtacgagaaaagttaaaagaaggagccgtcgcttgcaggctttggccaagttcagtgaaaccacctttgtttaagtcgtcagcatcaatcaaatcaaccggcgatgttgattcggtagccgtacgattggcaactcgtgagcctaatacagagatttgttcgatatttttatctgcttttacgccagatgcttgctcagctgcctgcactgaagtcgcagaaacagccacactgaccgctacggccagcatacttaaagaatgtgttgtcatgtgtatcctgttgatattctggctttccttaaatcaaaaagacgcccctttggagaagttaaggaaaagcactaagcacgtaatgttgattttaaaaatcataaatttgaaagctaactcaagcctgcgagttaccccttgggaaacatcctatcaacaaaaaaatgaaatgaaagaaaaatttgttacgacttaggtataattttttctatttgtatgattaatagattttataagggaggaattattcaattaatagtagaaataagcaaattaatgcaaccatttacttatctctaccaactcaatctatttattgatcttgctctaacatcgccagcttttcatcttcgagcattaaggccatggtggctatttcggctaaactctcgtctaatgcagcaaaaaaagtcgcaaacccttcacccaatttttctggctctgggtgattagcaagtgcttgatcccacattgcaaaagtagttaataaatcgagtgtagcttcaaagttatcaatgaaaagctgcccttcttcactggcttctttttgctcatcagcttgcagtaaaaactgtaagtcactgtgccaaatatcttgattaactatgtatgcagcaatgtaaccgctgcaaaagtcttgtaatgcttggctaggttcatttgcatcagcatcattggaatataaatgagcaagtattttcttttgctcaacttgagcttctgtcacattatcaagtaactcaatcattgcatcgcgcggctctgaatcggtcattaatgtattgaatattgattcatcgttatcagcgatataatttgcaagctctgactcaccaaaaaactcagagcaggcaagcagtccagccataaatccaatgacctgatctaaactaacttgattcgtctcgctttgacttgcgagatagtttttcaatacttctgagctttctgtgttaaacatagcgtgcctttatatttaatgttggtcagtacttagtcttacactatcgaatctacagcgttttgcaacaacttaaattgtgtcaattagttaaccacatctctaacgtgactttgcactggaaatacacaactaatgcgcgtgcccgttccctctgtgctttgtatttcaatagtgccttgatgatcatgcactatcgcataaaccatggtcattcccattccagtgccttcccctaccggtttggtcgtgtagaaaggatcatatattttagcgatagtttctgctgacatccccacgccattgtcttcaacatcaatataaatatgatgttgaagttcataaaccgacacagtgatctgcgcttttgagctactcgcatcacaagcttgctttgcatttattaatacattcacaatcacttgactgatagcagctaaattacaccagctctcagaaatcgtatggtagtcagtttgtaaatggcatcctttaagttgattcgctaataacttaactgcactttttaccgcatcagtcatatcagcaaactgtttgttatggccctttggtcgagagaaatcgagcaaatttgcaactatcttgctgatcctttgtaaaccttgcgctgtgtcatttattaagtcaggcaaatcatctgctaaataacgaacagagtgtactttatttaaatcggttaattgctgacaaaacgccgctttatccatttcactacaggcaaattcatcacatttagctaataatgcactgaaataattgcaatactccttaagggtatcgacattactaatgctataagcaagggggttgttaatttcatgggcaaccccagcgcatagtgtgcccaaagtcgccattttttctgcttgaataaacattgcttgatgacgctctaagtctgcaattttttgttcaagctcactgtttaatgcaacaagaatacggctcttgtctgctaacagttgctctgcctcttccctagctgctttttctagtaaataagcttgcttaaagtcattcatttttctctcaaactttagcctgtatcacttaaaacctagcacaagcctagatttaaggctatgttattgattaacgatggttcacagtaaatcgctatggcagaaaaagtaagcaaagagcatattcaagtattatgcattgatgatgacgaaattgttttacgcactttattaaggttgttatctgcacataatatctcagcaaaagcgacagcagatccgacagaaggtcttacgctattagcagcttataattttgatgtgattatttgtgacatgcgcatgccacagatggatggcgcggagttttttgctcaagcacttagtattgcaccagatccacaacgtattttattgaccggttactcagacatcgacaataccattgccgcagtcaataaaggtaagatccatgcttatattcaaaaaccttggcaaaatgaattactgcttcgcaatattagtgatggcattgaaaaaacctctcttaaacgagaaaacaaacgccttgaacagcaaattaaagcacaaaatgcgcaactaaaagagctcaacaataaccttgagcaaatggtcgaaaagcgaactctacaaattcgtaaagtgcttaaacagctcgaagaagtaaacgagcgtgaaaaacacgagcaccgcacaacctttgagattttatacaacttcattaatgcaaacccttatctagacggtatgcaagcacaaaacattgccactaccagcaagcaaattgcagagcaacttggtttagataagcaacacatcgaaatggctgaaatggctggataccttgcgcaaatagggctgctagcaatggagccagagctttataaaaagccaaccagagagcttacagaaaaccaaaaaaagttattttatactcacccaagtacagcccagttaatgcttatgcctgcaccacatttacatgatgtctctgaggctatttattatcaatttgaacactataatggctctggcatacccaaaggcttaaaaggtaaagaaataccgattaccgcaatgattttagcggtggctagagacttttggcaaacaatcgcccatataaatgtgcaagacaacagcaagtttgaaagtgcgcttgaccaattgcaattatacagtggcacctactaccacccgaagattttagaaaccctcggcagtttaaaaataacctgtgccagtgatcagcaagttggcactatgaaaattatctctgctcaacaactaaaaaatggcatggttttaggtcatgcactaagaaactacgatggaattcttttactaccaaaagggcatgtatttggccctaaatcaattagcaagttacaacagcttgaagctaaaaaaccaaatcctttcaggatcatgatcaaaaattagcgaataaagtgatcacatagtcaggttagttcgttacaatacgatttatataacgtttacttcataaaggagcgctcagtgtcgcgattttccgctataaccgataacccgcatgacggccgattcaataaaaaaacgggtattttattgaccaacttagggagcccagatgcgccaacaacagcggcacttagaacttacttacgcgagtttttatctgatcctcgtatcgtcgagatccctcgctttatttggatgattatcctgtattgctttgttttaacgctgcgcccgaaacgttcagcagcactttacaaaagcatctggactgaaaacggctcaccactaacacacattacgcgagaacaaagtaaacgccttgcagcactattaaaagataaagggcaccacgacactgaagtggttatggcaatgcgatacggtaaaccatcgattgaagcaggtcttgaagagcttcgcgacaaaggtatcactcgcgttatcgtgctgccgatgtatccgcaatattcaagcactaccataggctcaacgtttgatgcagtatcaaatgtgcttcgtaaatggcgctgggtgccagagcttcattttattaatggttatcacaataacccaacttatattgatgccctcgccgctagcattagtgaagacttaaatacccatggcacaccacaaaagctagtgttttcgtaccacggtacacctaagcaatttttagaaaatggcgacccttactactgcttttgtatgcaaactacccgcttagttgctgaaaagctgggttttgagaaagactttactgtaacaacattccaaagccgctttggtaaagcagagtggttaaaaccttacaccgatgccacacttgaaagctatccagagcaaggtattaaggatatagcgattatcagccctgcatttagtgccgattgcctagaaaccttagaagaaattgaaggcgaaaatcgtgaaatttttgaacatgcaggtggtgaaaagtaccgatacataccagcactcaatacccgcagtgatcacatcaatgccatatttgaagtgataaaaccgttacttaaataacgaaaggccccagtaaagctggggctttttttgttatacactgccttgcgattcgataaccaaaattcgcgcttctcccttggggtgcgcaacatgctccgtgccaacactggcaaaaaagatatcccctggattaagaagctcagcacatacttcaccatgctgtttataaagcatttcaacctgaccacttaacaccacaaaaacttcttcgccattattgatgtgccatttgtaaggttcattcgtccagtgcaaacgagttgtaataccattcatattggcaatatctaatgctccccaagctcgttctgctgtaaattcgtggcttcgtataacttgcatcgtttcaagtccttcaatctttacgtgtcataaccaaagtcaccgtgccagcaacaatcccccaaaacgcagaaccgaccgagaataaggttaggttagaagctgtgactaaaaaggtcactatagcggcttcggtataatacgcctcagttaaagcttgctgtaagctactagcaatggtggcgaataacgcaatacctgccaacgctaaaataagagcttgtggcaaacttgctaccaaaccaactagcgttgcggcaaggagcgccataataatgtaaaacacaccacccgcaatgcttgcccaataacgcttgcttgggtctttatcagcctcaggactcatacaaattgccgcagtgatggcagcaagattaattgcataaccaccaaaaggcgcaataaacacatttaaaagtcccgttacatttaacgccgccgacacaggggctttatatttatgcgcttttaacacggcgatgccaggtaagttttgcgatgtcatcgttactataaacagcggtaaaccaacactgatcatggcattaatgtcgaacactggcgctatgtaagcaaactcgctcattttccactgccagctagaggtatcgatttgccctgttatgcctgccattaaaaagccagccacaaccactgcgagcattgcaaagcgcgcaaagtaacgttttccacataaatacaccgcgaccattaaaccaattactaatggcagttcgttcataaaattaaatacatcaatgccaaaattcaccagtacacctgcaagcatggcacaagccagttggcttggaattttgttcatcattttttcgaacacgccggtaataccagataaaaacaccagcgccgcagagaacataaacgcgccaacagcttggtttaagctatacccttgagcgcttgaaataagtaatgccgctccggttgttgaccacgcaataagaatcggcactttgtagtaataagacaaagcaattgagctcacacccatagcgagaccgagcattaacacccagctggcaactaaatcgggggtgccgcctaacaccatcacaacctgataaataagcgcgattgagctggtaaagccgataataacagccactaaacccgcagttgctcgactgatgagctgactcatgtacacacactccttgccaataaaaaaatctaccttatcctatgatttgctaattagcactgtacacttttgtagtatttgtaagtttatttactatacagatgacacaaaaaaggcgtgttatatacacgccttgaaaaatattaaacagcctctaaacaaggctcttcgagtacttcgggcttatcaaaaatacccagacgaatgcgaataaagtgcaaaatctctttggctacatcaatccctaacgccccttctaaaccttcaaaacctgggcttgagtttgcttcacaaattttaaagtgctgctcgtcaaataataagtcaatgcccgctacatcaaggttgagtacgttcgcagtttgagttgcaagccattcgatttctggcgtgataggaaatgacttgcctgttcctccggcacttacattggctttaaagtttttaccctgtgagttacgctccatacatgcaacagcacgcccaccgatagtaagcactcgcaaatctcgaccatgactcgacttaacaaactgctgtaaaataatatttgcctgtgggtttgccgcttcaataagttgcattaagtcatcaaactcatcttttgattttgataaaaatacgccactaccctgcgagcccgataacgtctttatcacaacaggaaaaccaatctgtttttccactaaatcaatgttcaccggaaacttaaccaacatggtatttggtgtaggcaaattacattctgctaaaatttgctgtgcaaataatttgtcttttaccgtttcaattgattgcgagctatttacacaatacacacctaaacgttccaagtgacgaataattgccaacgcaaaataggttgtgcttgcacccattcgtggaataacgaagtctggtaacgcaactgattgcccatcgattaagatgcttttgccatcttcgcgagtaattgttaaatcaaactgatcaggcgagtaaacatgtaagtcgatgccttcttcttttgcagcagcaagcaagcgctctacctcgtaggtctcttgctttagcaaaccttggctatctttataaataatccacccgcgcatactcgttacctctaatcttgggtttatgtgacaaaaaaacgcggattatgctgagcattgcaaactaagtaaaattaattaattttatcgtcacgacaattattaccgcaacttactgattatctattgaccaagatgttaacttaaggtaaaaatcaacattaagttaacattaaaacccgtaagagaaacatgtgaacaggacgcttgcattaatcttcattttgccactcactgcatttgcattgaatgaatggcatattcaaagtgatggttttacatcaaaaccagacacacaaccgaatgttgcaacttacaattcagagcaacaggtgctacctcagcaacctactgttaatttaacagcaccgctaaatcagctttcaaacaaagcccatgaatttctctacaaacaaggtcgtttgcccgagaaattaagtgacacagcgtttagtgaattcgatttagataccctaaaaacacttcaagcgggtgataacttaattttagctgttgatgaaagccgcacttacacgctagaaataagcaatattattgaagcgagcaatggtgatcggagcgtatttggtaaagtcactgatgatgacaagactagccatcaagcagtgatgaccgtaacaaaaaatactctgcaagggcagcttaacacccacactgacagctataaatttataagccacggagaatacggctgggtaacgaagttgtaagagttacaaggggaaagtggaagcgagcgagatacaagagtaaagttacgagattcgagatgcgagatgcgagtatgtagcggcgattttacatcgcgtcctagagcctagctcctttcccctcgctaactttactctttcatcttataactaactactcaacaaccactggccacaaacttgcgccatcgctatcaattgggcttaagatctcaagaccaagtattttggcgatgagcgggtacacatctaaattacttacttcgtctaagcgcatgccttgcttaaaagctgggccttcggctataaaggtggcggccatatcttcgctataggcataaccatgagtgcctaaataaccggccattttactatcggtaaacacgcggggtgcttcggtttgcaaaataatatcgccaactcgcgggcctttatcatagtgataatcgtgcttttgcttctcacttaatacgatgtaacgaccttcagcggctttagcgagctttttgctgaatccgctaatatctgctttgctatctggttttgcataatataagacgcgagggcctgtgttttgcactataaagttttcgtcttgtggcaggctatcaattttgatgctatggcttggatcaacagacgccataccatgatcagacacaatcactaagttaatattttcatcaagtgcttttaaacgactcgataaatcagccattaaactgtcgagcttttgtactgcatcataggtttctttggcatctgggccaaactcatgtcccatactatccaccagcgaaaaataactaatcaccaaacgaggtcgctgtgcttttggtaagctcaaccactgaataatttggtcaacgcgtctttggtaatcactgtgttttgaataatggtaaaaataatcaggtaacataccgttaaaacgtgcatctgactctggccaaaaataggtggctgcttttaagccctgcatttgtgctaaattccaaagcggaatgccgttaacccaagtgctatcgtctttaccttttcccattttgtagcagtcgttgcgctcagtatcacaaaagcggttatcgacaatgccatgattaacaggcagcaaaccggtaataatcgaaatatgattcggaaaagttttggttgggtatacggggcgcattttggttgctcttacgccctgctcactgattgcttttaaatgtttcgcctgatgtttttcaatgtaatcccaacgaaacccatctatcgaaataagtaccaccgattgctcttgttcagcttttacacccgaactgaaaagcaataccccagctaaaactagttgccaaatacgcatagaaaaccctttcgtttaatttttaatttgcttagagactttagcaaatagttttgaaaattttgtgataatgactgctaactttttatataacgttttactaattagctttatgcatgccaccgtaaaaatggttgccaaacatccaaaagaccttactttatatcccaaggtaggagataagtatgtaaaagcaaatcatatatgaataagtggcttaatttaaagtaagacattaataaaaaaaggatatttaaattttggatacaagctgttagattaaatttaattatggctaagttttgctaacaactctcaactgcgcggcttatattgctttgtgggaaaaataaatgatcgattttggtaagaaaatcacccctgcacgcgaaatgcgttcaaccaataacttgcatactgcgcttgaaagtgatcgaggtcgtattattaatagcgctgctattcgtcgcttacaacaaaaaacccaagtttttccgcttgaacgcaatgctgccgtgcgctcaaggcttactcactctcttgaagtacaacaagtaggtcgctttattgtacaaacaatttttaacaagttgagcgatgccaagcaaaaagaatatggtttagtggggcttgaacggcctttagaaagcctcgttgaaatggcgtgtctaatgcacgacataggcaacccaccctttggccactttggcgaagcagcaatcaaccaatggtttgctaagcatctagatgctttaactcctgagcgctgcaaaggaattggtataagtgttatttttaaacacctcgctgaggatattaaaaattttgaaggtaatgcgcaggggatccgcattatccattcattgctatcacttaatttaacttacagccaaagtgcgggcattttaaagtacacacgcccggccagtatgctcaagtcagatattccacaagacaaaaactacttaatgaaaaaagtcggttactacttcagcgaaaaaccatttgttgaagcactacaaaccgaacttgatatagagcaatattgtcgccatccaatcagctatattatggaagctgccgacgatatctcatactgtctagccgacatagaagatgccgtagaaaaaggcattattagcgtagagtcgctctgtgaaaaactcaaagagcaatacagtcgcacacttactaacctcacaattgacgatactaagcatagtgactttgccgaaaaagccattgattatgcgctaagcaaggctcaagaacagccttacaattttaatagtgagtttttcatctacttacgcgtcactttattgcacccgttagtgagttatgcagctgagcgctttattaataatatcgaagctatttaccacggcgactttaatcaagctttattagaagatcgtagtcacttacatgctgtcacacttaccttaaaacaggttgcactaaaacatgttttttgccacaaagaagtggagcgtttagaactacaaggttaccgcattattagtggcctgcttgattgctataaaccattacttgctcttgaagctgatgcgtttaagcgtgtgttaaaaggcgaccaaaattacttaatagaaacacgactagtaaaaaaactctcaaataaacatttgaacagctatcaaaaggcgattgacgcgttaaaagcagagcccgatcactttgctgcctatgagttttattatcgttgtcgattaattcaagattatattagcggtatgacagaccaatttgcctatgacgaataccgcgcactcatggtgatagattaagcgattgtggataaattgccggtctgagcttaaaattaattaactacttgggtaaccagattaaccttactggtaagagaactatgccaataaaaaaactatctattttgctgtttcttataagcatgagctttgcaactaaagcacaatacaatgaagcaatgtgtatattgttaaaacagcaaatgcatgagtttcgttttaacaccagcaacaaaaattatcgatctgctgctagaagctttgaaaaaaattgccagaacccaacgccagtgcataacgaagcggcgcttgaaaacatcgctgagcagacaatagactcccctcccgtttcggttaataaagtgaatcgctcaaacggccactccggtgctattttaggcacccctgaagaaactacagcaccagaagcaaatgctattaacgaaagcgagcaagctgacaccacagctgaacaagcaatcctaacaaatagagtgaacgacgagcctgctgcaccagaaactcctcaggttgagagtatccctagcaatgatttagcaacaacgacggaacaacctaagcaaagtgctgcagagactgttgttgaaccggtaattgaggctattaaagaacctactgaaatctcgcctgagttcgagccacaaacaccagtacaagagcctgttgcaacagaaacagataatgcgcaaataaataacactcctcttcccgagccaacaccagcgccggttcaaaataatgaagttagctcatcaagttcactgttagtaccaagcttaatcgttttactcattttgcttatcgcaggattagttattgttcgaattcgtcaaagtaaacaaaacgattcagattcagagttagcacaagatttactccatgctcaggctataaaagctgcagctgaggctaaaacacaaaaaaatcaaaacgactcagactttttagctcctgagccaacaccagaattaaacagctcttcagcttatgacagtaatacttctgcgccgtatgattcattttctgcttctgaaaaccagcaaccagaaaaacaagaagacgatttcacgagctttaatgcaacaacagaagagcaagctccaactgatgatacgtgggctgatctaaattacgcgcaaaataaacagagcacggctttaatagatgatgagccagagcaagcggaagaaagcgagcctgaagaaagcgagccggaagagccacgctttagctcatcgtcatttggttttgacgaatacaaagcaccaacaactgatgatgagccagcactagagcaacctgaagaaaacgagcctaaagagccacgctttagctcatcgtcatttggttttgacgaatacaaagcaccagttactaatgatgagccagcactagagcaacctgaagaaagcgagcctgaagagccacgctttagctcatcgtcatttggttttgacgaatacaaagcaccagttactgatgatgagccagcactagagcaacctgaagaaagcgagcctgaagagccacgctttagctcgtcgtcatttggttttgacgaatacaaagcaccagttactgatgatgagccagcactagagcaacctgaacaaagcgagcctgaagggcctcgctttagctcgtcgtcatttggttttgacgaatacaaagcaccagttactgatgatgagccagcacaagagcaacctgaagaaagcgagcctgaagagccacgctttagctcatcgtcatttggttttgacgaatacaaagcaccagttactgatgatgagccagcactagagcaacctgaagcaagcgagcctgaagagccaagctttagctcatcgtcatttggttttgacgaatacaaaacaccaaataccgaagaaaaacctaaacatgatgacgtacccgagtacgacttatcatcattagccaatgaggatctttcattcactgaagattttagtaaaacagatcaaacacctacacatgaaatatctgcagatgatgatattagcgatgatgatttagcaaaagcgttgcaagcacttgagttagagttgcaagatgagcctgttagctttgacgataccgagcaagacgatacccccacaatttcactagatgaaagccatcaaggtaaagatgcttattcagctgatgaagaaatgacagatcagcaaaaagaagatgtactaccagacgatgagcaaaccgatgaaaaacccaataacccatttgctaatttgtcattagacccagcatgggatccagagtcaaacgaaaagcctgttattgaaaacaaagcaaaacagccaaaatcacaagctttaattgacgcagaagagcgcgcaaaaaaatttaaaactgacgattaaaaacttaccatgtagcaagataactaggcatcattccttgctacatggaattatttaattgacgctcttgattgcataagccaatgataaacaaaaattattgagaaaaaagctgtcaacgcaatgcagcacaacacgataatattcactggtaatatagtttcacttgtacggctatatcgctttgactcttgctgagcaagaattttcgctcgctcagctttgcttggcaaaataaactcatgaaatgtgtctgttggttttgcttctgagcgggttgtttgtacatttttttgctgccatagcatatcaaattgttgaaactgaatttgtttgttttcgatacaccaatctaaatttttaagctctaacgctttttctatacaccgggtgggcattacataaaaacgctcccatgccgcttgtttgctgcttaacgcttgcgctgtgagaggttgagatactgagctttctaaatcagaaaaatctttacggtacaaagcattggttttttcagctatttgctctttggtaaaacatgactcagaaatacgtgatgataaattatcaatacgtaatttatagacacttatttcatcaagcaaatgggctttacgaagtgcagattgcaactctttgcgttcagtttgcatacgtttacattcattctgagactcagtgggctgagctaacaaacatgcaggaataaacagaaaagctgcaattaaaatccttttaaacatatatttacgtcactgtaaaaatttagaggtacagcgtatcattttgaattaaaactgcaacacttcttagccaatcatcctaaagaattgctttttatttcccattaatttggcttgtcgcgatttatagtgttgatcatcatatgcaaattgcttctgcagccagtctttaaataattggactttttgccatttaaaatgctctaaaggtgctgcaaggtaatacttgtactggcaatggtattcaaaatcagggtaaatctctaactgcccatgtaaaagttgagactcaattaaccgccgcctaaccaaagcaattccttgtcctgcaagcgtagcttggatcaccaatgccgcgttatctatctcaagcgagggcaaagcatcagggctgactgcaagttcatcagccaactttagccaaccgcgctctgcatctggacaaatatcttttattaatttttgctctaacacctgattttttagtgacttagaagtatctatagcccctggtttataagccaaaaataaactgtcgtcactgatgagctcactatgcaaacccgggtaactaccttgaccgaaacgaatacctaaatcgacctgccccgctgaaaagtcagcaagctgatcgctgggttcaatacgcactttgatatggggatatttgttttgaaagtcgctaattcggccaagcaaccaaccactggcgaacgaaggtagcacagttaagtttaacgtatttgggtggctatcttggctaactgcctgcacaccggcctgcaaatggctaaaccccttaagtacatggggtaaaagctgttcaccttggcgggtaagctcaacataacgggtatgacgagtaaacaaattacaatcaagctgctgttctaacaagcgaatttgttggctaaccgctgcttggctaacaaataattgctctgctgcaagcttaaaactacctaactctgccgcgtgcttaaaataccaaaggctttttaatggaggtaactgcatacgcacttatggttaataaaaacttaagcataggcaatttttaatcgtttgtcagtagtggtaacacgagtaatactcatacagccaaccgcgacaagacaaggacaaccatcatgaaatacttaattattttattgcttttatgtgcttcaagctttagttatgccaaccaaccagtaataacacagcttgataccgatgaaggctacccttataaaaacttaattcaaaaagtagaacgagtagaaattcgttatgtagaacaccagcattcggtgacctgcaaagtcaatgtacaaacactccgcaaccaatatatgggcaaagaacaaacagtctcagccaagctgtttgcaaaacgcccaatggccgcgtgtttaacccgcgaaaaagccaagcaaatcctgcatatgctgtaaccatttcaaccttgttaaactaggctacgaatagctgtacttccccagtagcctagttttttcctatcaaagtaaaacgtgtttcgtgcgtttaaatgtagagactaactgtttgctagatcttttttcgaaccacagaggacatagagagcacagagaaagacaaggagtcctctaaagcgaagcacctcttatcctctttgtgcagcgcagcgcctcggtgaactttgtggttcaaatatgtttattcacaaagagaactgaatgagaaaacaacgaggaaacccaaataactttatctagccctcttctcagacgcagccagtaacctatttatcgagactaactatttgctagatcttttttcgaaccacagaggacatagagagcacagaggaatacaaggagttctctaaagcgcagcgcctcttaatctctttgtgagtattggtttttctctgtgcagcgcgcagcgccttggtgaactctgtggttcaaatatctttattcacaaagagaagtgaatgagaagacaacgaggaaacccaaattaacttcaccaaccttcttctcagacgcagccagtaacctatttatcgagaagaacagtttgccagatcttttttcgaaccacagaggacatagagagcacagagaaagacaaggagtcctctaaagcgcagcacctcttaacctctttgtgcattcagttttcctctgtgcagcgcgcagcgcctcggtgccctctgtggttcaaatatctatattcacaaagagaagtgaacgagaagacaacgagatactagttaagccaattagttattttcctctaaagcgcagcatctcttatcctctttgtgaatattaaatctaaagctcctccaccttctctatctcaactggctccgccaacgcattttcataaaacgcgaacaccgctttggtataaggctgagcataatgctcatcaagggcggcttgcgattcaaactgctcaactaaaaataaacaacgctgctctttgcttgcaaacagctcaaatcgattacaacctggctctgcacgagtggctgctaatatgccctgtaaacgccctttacagtcatcaaataatgccgcctttggggtaatttttgccacgatattaatcatactgactccttattatataactttaaaaccaatgcccgaattggcggggcaaccgtaaaagccaccacgaaagcagcaggccatgcattagcaaacgccttcatccaacttagaaaaaatgtatcgctcagccctaagttgacataagtgacccatgccgaaagtaaaaacgacattaaaaacgaaaatgccgcagtaaaagtaaaatgaattttcatatgtcctccttggcgttactatatttgcacaggctaagtggcaacagtcacgaaaatgcaaactaagattgagggagtcgtatgctggatgatctgcatttatttattgaaatagcgcgccgtaaaagcatgagccaaacagcaaaagatttaggactgaatctatcaaccctatcaaggcgtattcaggcgttagaagaaaaactcgcagagccattactgcaacgcacagcccgaggcattgtgttaaccgccaaaggtgaatcactgtataacgagttaggcgagcaagtgcttgctcttaacagccagcttgagcaactaaatgactcacccgccgcaaaagagttttacctgttgtgcccacaaaacatcattgcgggcccactgatgggggccgttaatcagtttgcgatggcaaaccctacgctaaacctccacatttacccaagtaatgccaacagccaactaagccaaaaacgttttgacttagccattcgcattggcgaacaacaagactcaagtttttttcaaaagcgcctaggcatgatcgcaataaagctgattaaaaagaaagatgccccaacatcaaggctgatactgccctattcagagtcacaactccccagcggttttctaaacaaattaaaaaccgagtatgaacacataagcttttgttttgatattacaatcgccagaaaaatggttgaagcaggctatggcattggcttactacccatgagcgaaatttgctgtatagacgataccagccactttagctatatcgaatcaccccaaagtattcccgcaaggccaatttacgccctctggccacattcacgcacgccatcagcaaatgcccagttgttgatagaacaactccaaaccagtattgcagactcaccgagtttacaaggagaagtgttgttgctttagttgcgagtcattgtaggtcgggcttcagcccgtctagtaactcaatctttaaagcaacgatatagaccaaacacaaacaacattgccgcaatgccagccaaggctaattgccaaattttaaggccattgaactttgtagattgtggactaatactctcatttaaaggagccgaagcttgctgaattgttggctcggttatctggctctttattgcaatttggcttgtggctttgtttgaatttatttctgtaatggttggctttactgaaataactacatctttgtattctgatttttgtttaccgctccaagccgattcaaacagcgccttttgctcagctttattttcgctacaccatacaaaatcagcttgctgaatatttttcgctctacagcgatccggtaattgataaaattgcccccaagcatggcgttttttatcgtcattatatgaatttgaatacaccgtagagttatgtactttggtgtttaaaagtgcgctagggttcgagcgatacgtataagtaccgccattaccagaacttctttttgggtgtttgcagtgtctcgccagcagcgtaaaaagctcatctaaacgttgattccaacgttcaccttgcttagccgtatagctacgattcattcttttacgaatgccttcgcgctcagcctctatactatcgcagcggctttttgaatattgctcttcagcaaccgtgttgaaactcgcaagcaaaatagcgagagataaaatccatttattcataacattacatctatgtaatttggttgtaattattccctatgtgttagctagggaagtatttattcaatgctatcttttcttaagcggtcttcaaacaacatctttttagaaatagattgtagacctctttgaatatctgtcgaaataaaccctaaattaagagcactagagattgctaaatctgaatttttaaactccctcaattgagcaatattgcctaaatagctttctaatagttcaggttttgcctgtctatttaggtttttacgaaaggtttctacaaacttacgttcttcttctgtgtcgtcatcttcaaacctttcacaatacactctcttagctacctcagtgatactcaacccaagcttattaattataaattttatttctttttgtaattcttcgtatttttccattttttgtcccaaattgtcccagagtgctcagtaagatgaacttgctctttaagcgaagagctatttttaaacttaaaaaggatatactcatgaaaaacatgactcaaagtgccgctgcacgaattcaagcagctgaagcaaaggcaaacaatggtttagttgcacaaggtggttttgccgcaagagcacaacgagcagcagcaaacaaccagcaatcatcacgccctgcgccacctaatggaccaagtaaaacaggtaacccatcaggcccaggcagaggtaacaatcctccgaaatctaaataaacttttacgctatagcggcatgaatgccgctatttacattgctgataatttttccaaaatactttctggaactcactagctttggagcttaactcagcctctggcacttctttcattgtttgatctaaagcacaaatgcagtttttagctaaagacttcctttcataatgccttaaacttgaaccagggtttgaacaaaaactaactatctcaacaatagctcctgtcgaataacggcttggttcaaatagctctttatcaagcttgtatgcacctacagcaccaataaacaaagcaaactttgctgtaaaaaatggcttcttaaacttttgatacgtatgacctgcgaatgaattttcgcatttgtgacatttaatatgatttccgtactctaaagtattttcttcttcacagtcaggacaaacaatattgagagggcgtgtgctagaaacagcattagatgtatttttatcagcttccattgctttcttattctttgaaatccatatgtatagattattgatactaaataaattaatcaataaaaacatttgattttacgggtttattattcttttatagttgcttgccatcgtaagtcaggcttcagcccgtttcttgatccaatttcgggtgtgaacacggggataaatcagcaatccaacccaggctaaatttgtcgatgtacaaagagttatgtatattaattttaacttagctgagaatttaaaatgacagagcaaaatccaaaaggtgtttggcttagcagcaaagaagcgatgaagcaccttaaaataagtgcatgtgaattaatgcacctccgtgagcgaggtttgcttaagtttgaaaaacgcggtcgcgcttatttttattattttgaatacccaaagggaatttaagtgttatttaaagacatactcattgagatgcaagaacaagatatcagcatatctgaacctcaaggctttcaggcctatgcaaaaactaataacgtttcagcgaatactgctgcgagcatttcgatagattcatttaaaaagctacctaaggtacttaaacaatcaaacgctatggtactcaggttaggatctcgtccaaaggataaccaaacatacttttcattagtaaaaactattaatgtccaagatttctttttcgatgatgagtcgctattcggcaaactgaagccagagttatttttaccaaatgtttcaatccgcagtctgtatgcttttcagttgctacctaaggtcactgaaacctcagttgtaaatttagccatagcatctggcttaatggctgaagctcttaatctagaagatgacaaaactatagtcgttccagcaacagggcaaagtacattcacttttaattttaagcctctagcgaatgaaaacattgttctacaacatatcaatgggcaagttgaaatcgatgccgtatttgtagcaaaacgagatggtaaagagcatttatttgttgttgaggcaaaacatggcgataaatttgattcgttagcaaagcacaaattgctttaccccagtttaagcttgctacaaaagctaccctcttcaatgccaattgtaccggtatacctgagaagtatgaaaactgataagggtatcaacttctttgtggcagaatgctctcgcattgtaaatcaacaagatgaactatatagtttagatatgttgagaccctgtaaagtacaggcactgcatttagcaaattattaagatatgaattcagagcaatttaaagagttagttaaaaaagttaaagtcgccaaaaaactgccagatgcaatatattttcataaagatgcattcgaacacgcacctcaagaaatcgtaaagttcataaagattgttgcccaagctttaaagattgctgaagctgattacgacttagtaaagctttttaagaatgattttagactctcccttttaagttaccctgatttttatactgaatcgtatccaccactgaaacaaagtgtaacggtagaccttgctaagctaactcataaagttacaagctacgaaaacacagacaaccctcctattcttcatagaaaagaaaccatgatcccatcagacaataatcactacactttattttgtgatatcacatctgagggggaacaagcaggactttatgaaaacagccgaatgattggtttcaaaagctcatgggaaaggctaattgccaaaaaaggctatgagctagtcgatggtagactttttagactctcagcagttacaaaaactgacgaagataaatctatcgacagacatttaactgcaatagttagacatgaactatcagctcctctaaagacattagcaaagcatggttttttagctggtgagctttctatatttgattacgggtgtggccgtggcgatgatctcagagaactcgaagcacatggtttagatgcgttaggctgggatcctaattaccgccctgatgcagacaaagtcaattctgacattgttaatatcggcttcgttattaacgttattgaagatagagatgaaagaatcgaggcattattaggtgcttgggagcttaccgataagcttttggttgtgtcggcaatgctgggaaatgaatcactaatcagtcaatttcagccatataaagatggcattattacaagccgaaatacgtttcaaaaatactatactcaagctgagctaaaagcctttatagagatgagcgtagacgaaaatgctatagcagtttcaccaggtatttattacatattcaaagataaaaagcttgaacagcagtttttacaaaatcgacacaagcgtacatataagtggcaacacttaacatcaccagagcctgtaaatgaagaacaagcacgtatcttgtttacacaacatcactcactctttgagtcattttggttaacttgcttaactttagggcgctgcccagcaaatgatgaatttgataaaagtgataagttaaaggaagtaatcggctcaaataaaaaagcattacaactagctttaaaatgctttgataaagaagagcttaaaactgctgaaacaatgcgtaaagaagacttgttactttattttgctttagcaatgtttgaaaaaaggaaaccttacacccaacagccagaagacttaaagcgagacataaaagctttttttgacacttacaaaatagctcaaactcaagctaccgaacttttgtttcaaatttctgatagtgaattaatccaagagctttgtatcgaagccaataaactattacctgcaagcaaaattaactttgagaatgacaaacctcacgctcttacctttcacaaagactttattgatttattaccgcttgtattgcgaatctacgttggagcagctctacaaatgtacggtgagctcgatgacatacaacttataaaaattcatatgcattcaggtaaggtaacactgctcggttatgaaggcttttatgattcacctttgccacagctgaaagagcgcgttaaaataaaaatggcagagcaagatgttgacttctttgattatatcattgaagaaaagcgtccacttcttcttaataaaattgagtatattgataacacttttgatgattataagaagcaaaaggcgtttaataaacgcctttgggaagagcttagcgagcttagtagtgagtatcgaaatatgaactatagtcagctactagcattattaaaccaagtgaaattgcatattaagagttatcgtttttaccgaaactagatgtttttaaaaacttcttcactatggtatttcatatactgcatttgattatctgtaaaaaaataatttttctctctatcaatactccataattctaggacactttttgacaaaagtttagagctgacaatacgacctttatcattaaaagtaattaaccctctatcaaataatttatcaatatgtggggcaagcaataatccatttgatccatcatatttttcaatattattagacgctttccatggttttatatgactagcaaccaatactgaatgctccttcacaccagtgacgatacatttaccttgacattcttgaatcacgttttctctaaagtacgactgacccaacctataattaactattcctaaaccttcagttacctcaaattttttgaaatcaggtaatatcgaatttctagagtagcccttagtataaagataaaacttattcttctgagtagggcttttttcaaaccaaacgttatcacctattgatatccccatttctgaaaattcattttttgccctggaaaaagtaaggtaatgtctacctgatgatttacgattgagtgtaatataaaagacattgctattaatacaaaactcaagcggttcgctttgttcccctaagcctagtttctcatcaatgaaaaatataactatatctttaggtacgcctgactcaaagccattaattaaagatttatcagcttttttgattactatattttcagataataaagtccatgaatgtgatgtaaaagggtattcctctatcatttagttatctcacagtaaaaccatatactattgcttgatagaacttatcttttagaaaggctttacgcttcaaaaagaaatcatttttggggatgttgttatgactatgattttcaaataaaacctttgtttcacttaccagccaatgacttccaagccctgatttatcgaggtaatcaaaaacttcgataagtggtttatttgatttgctaatatttaggttccccggtagtgggaacatattccctaagccattgacagttacttgtctgtcctcactatcaaaataactacccttattatgttctggcacagagctaggctccatatgatctaagtgcaatctttcaacatcgctatcactcaaagacattttgaagttattctctgtcagcaactctttggatgacgattttataagtcgagcaaaaagcaagcacaccttaatatcacttttattatatctccaattatcaagccaagtatttaattcatcctttaactttttagtaataaaatcaacttcatgaaaatctacatccgtggaattaacattattagcctttattaacttagcagcatattctctaggtaactccgctgaaggtgcctgcatggataattgccaaactcttgttgataacttatggagttcaacatgtttttcttcttgcgtctttaactcctcaaaaaaagctttcacctttgaaggttcaaattgattagatatatttatttcaatatatttaaaaataacattagttaccccaactaataccccaaactgccctagtgcagatagtaaatgaatcaacttatacgtaggtgaactattaatcgaatattctgcttttagagcttttttatttttacttttatgccaaatatcaaacaagtttacgaatgttgtgcaagcttcaaaagcgttaaagtcttttagaaactcattagaatgataacttgataattgctctagatggttagttatctttaagcgatttttttcatttgattgtaataaatagtccgtttcacctgaataataagatgaaaatatatatgtaattagtggcttgtgtgcaattttcaaatcgtcagggaagatagcctcgccccactgtatttctcgctgctcaataattttgtctatttctttatcagataatgtattattatataaacaaaacttcttataaaattgattttttattaagtctaaatcatctaaagataacgcgcgatcatttaaaacttcaaaaagcgtgtaagcatcattaacacttcctgtttgaataacacaaaagttaacttcctttaagaatttttctattagttttattgtattaattgctttaagtagaggctcgtcacctgtattttcacttaacttagtaaagtgattgaaaattgtttcaatagaatttctatattgtttagctacgggattatcatcattttctacaaactcaataatttgttcattctgactatccaacttaactaagcaattaattaaagaggactttaattgtgtactgaaggcagctcggtcataagatagtttaatactcttttcatcgaatgagttttctagtaactttttataactgtacttatattcacttttcccctcactcataatgggtaagtatgagtatttagaaaaaacttcagttaaagagcttaatatttcgctttcttcttcttcagttttagcctcatcaagactatctattttttccaaaatagtttctttaagtgcttcgaattgatttgcatcattcttttcatacaaataagttacactctttaaaaggctatctaataagcctgatactcttgatcttctatataaaatagcctctcgaatcgcaacgcgtatgattaaaaagcatacgtagtttattaagaaaactgtggtaaatctttgttgcccatcaattaattgatgcacgattccatcactgcttctaacagttacaattgagcctgtaaaatacttaccacttttttcattatgccaatcatttatgagtgtatttatatattctgttggccaacgatatggcctttggtaatgaggtatgcgaactaaagctttttctacccctaattcagtaccaaaagttaggttatagaaatttgctatttttgcttcttttaattccatttcacttctctttttataagctttaaaacttcacttcgtctaccaggcatataaacttctatttcatcacatccataaagcttgagataagaatacaaattagcctggagatcttttatttcttgccgatatggcgctggatcgtcagctaatgcatcatgtaacaagcttgatatttgcccgaaacctaaatcacgtcctgactggttttctgtaatttgtttttttaaccagcggtatgcttttgtttgcttaaacaacgttgatgctaaagcaaaatcgcttttaacattctcaatttgagcaaatggtaaggaagggttgagttgatatgcatttaaagtaatacctggtttacccagcgggaagtctgatacaaacagctctgatgtatctggcagtatctcttcaggccatactggtggtaaatcagctttatccgcaccatcaaattgctctaaaaaactctgcattttatcaagcatacttagagttagaacagttgctgattcaacaattttctcgataaatgctttagattgttcgcaagcaattactttgctacacgactctaaattaccattattaactagcgctaacccttttcccgttaaattagcactgccattaaaaatagtgtcattatctatttggtaaatttttgcatgcagatttacgagtgcttttacttggtagccattgttaatacaatcacgaagtgcctttaaatcacttgctccactcgcaaaatcaattggggtaaaccgaccaatcaaccaaactttaggcttgttgctagaaattaactgactcaaccaacgtgtcgctggttgggtcataaatgctgatatgattgttaatttagtgcagctgggtaacaattgctccagctgctctgtgagctctgtatttgtaatcagatgcgacatcaaaagtcatccgaatcttcaggtgtttgtaaaaactcgcttattactaacccccactctcgacggatagtatttaaataagctaacctacgctcatcagtagtctcattcataacacgtgcaaaacctgcaatagctgtttgcattatttctaattcatccccctcaagcttgctgataagcttttggtaaaaaacatgattagtattgaataaaactaaggttaaacctttactcgtagatacatcgaaaaatgcttcggaatcacgagcaacatcttcaattaaaaagcgattaccagtaaggatgagtcgctcagctttttcttcagcttcttcatcactcattccaccagcttttttaaggtggtcaacaacatcttcttttttaagctcttttggagcttcatcttttgttttatgaccgtgagtttcacggtgagctgaaccttgtgttgctttacttgcagctccttcagaagtcgttttaggctcttcagtgcctttagttgcttttccttgaatgtttacttctttaagctttttttccagctctttaacttgtttagaaattacatccgtaactttaaagacctctagtaacggatctgaattttctaaaagatctcgtttataatcagcttcactatcaaaaccagcctgctctgctatgctttgcatctcataaggaataatttttactgcatcttgtttattatttgttaccccaaataccgtatctaggcatggcggaaaagatacctctatgccgcaaaaacgtcctttactattcccaaagtcacctttaaagaatgagttccgcaggacaagctcccggccagcccgagttatagaaacaccaatattcttaccacagtgtttaccccattgggttgaaccaagagttgatgctgtggttttaagaatcctatttgcgatactctgcttaacaattgaagtggtaatagtaacatcagcccttttaggctcaccattatcatctaaatattcaacagaaatgacttctttatcagcttgctcgaaaaacgcttcatttttatagttacctggtaactctggtaacgaagtgttcttaagtagatacattggatcattggctttgaagttaaacctttcccaagcacttaaagaatctgttccatcatgcttatatataacactatcaatcttaatattatcttcagcgatgaagtgacgatacattcgaccgactaaatgttcgcaatgtctataaattgatttacctgttttccagctgagcctatctaattgagaccaaataacaagagtacctgaatcaggcctttgtggaaaaaatgctttcacaaacttctcaggaattgcctttattacgggttctggcacttcttctaagtcacctgttttcatttgttcaatatcaagaaatgtatgatatggttcaccaccgttttgccagctccatacgtcaacgcgcttacactgcgaaatagaggagttaggtaaccccataccaaatttacccatcccttcactatcatttcggtgtgtccctcccccaaactgcatagcttttcgcaatgtttcaggtgtcataccaacaccattatcccatagggttatctcagaaactgtgtaattttttttattggctaactgcttttcaataaaccctacttcaacacgagttgccttcgcttgtaagctattatctattaattcagctaatgcataggccgtattgttgtatccattatctcttaatgactcaataactgtttctgcacttaaaaatcgattgctcattacaactctcccttttcagcccacatttcattccaatacccaaaagcgaggctaatactttgaaactcaggtatatcatccattactgtataaatattacattcacgattaccgccactccgatgccctcgcatagctcttccagccatttgaagatattgaacgagagagttcataggctttgcgataatagttacattagtttttggtgcatcaaaaccggctgttaatacattaaaattaacaagaacttgtaaatcaccatttttatactgatttattttagctcttctgctttctgctgagtcatttttactatctattgaagccgccttaatacctctataggccaatgctgtagctagattaatactatgctcaacattacaagcgaaaacgattatttgtgagttgttatgacattctttgataattgtctgtaatattttccggtttcgttcagcgttttgcgcaagagtattcattgtttctggtcctccggcgtctttaagctcaaaagccgtaatacccgagtgatcgtaatttagcgacttaaaatttgcctttgctaagtaacccttttcaacaagataatctattggtgagaggtaacctgaaatacgcatagaaactttattattatcatagaagtttgctaattgagcatcttcatctgacaggccatcttctgaaaaactccttcctggtgttgcagttaagccgatcaatgatgctttaaaataatcatcattgataaaatcatccactacttctttaaactttggagctatagacttgtgcgcctcatcaaaaattaccatcgttactttttgagcaagttctttatagagaatctttaattgccgagagttgttctttctcaaacttaaaaacttgtgaaggccagcaacaacaaagcctgcgtctataccacttaaactttcatttgagttcgaatagaagccataaattgaagttgctctattacctaatgactgccaagctttactgaattcagcataagcttgagtgcacaactcttccctatcagccaaccataaaactacatttttatctgaagctcttaaatgctctgaagcaatattcattgcagttcttgtctttcctgcacctgtaggtaaatgtattaagactcttgaattaccagcatccagattagcgaaaacttgctttgtaatatcttgttgataagggtacatggcataatttggctcaacccttgttaaactttcaaggtcggtgttttgcttcagttgttgctcatatagttcacctaaaccgatggttgatgcaaagctaccgggattagccttagcccaacttatcaccgcatcgtaatgagcaggcgttacattattagtttctatttcgagtgatggaaataattcagaaagtaacctaggagggagtctatcgattaaacgctccctcaaagtatcatcaaataaaaagtcaacttgcttaacacttgcgactatatttgctaggttatttttattataagagttttgttcgctgatttgattattagaatcttcagttttcaatgcaaaatctagagactttttaggtaaaaaactgagtaactcatcttctgaaaaattagctaaaatattagtaagcatagtaatcctttaagtcatcatccattgtatacatcatttatctaaacataataatagttaattacctttatgattcatgacattacaacaaagcccctacagggacaagggaaataagacaaaaaacttaaccctgtatgaataaacagtctttatcattgtttttagatagtttaggcttccgttgctatcgttttcacgttactatccttctggacaagttctccaggagtagtctcaaagcatgaaagctaaatttacaggtcacgacaccttccctctacgctatggatggttattcaaagcagttaatcatttgaattcaaatggtaatttttcaagttctgacgaagaaagtattcgccattctattgtagaacttggtgttggtaaaaatatggttaaggcaattcagtattgggctgagtcaagtggcattatagaaagcatacgaaaaaataataaaacgctacataatgtgactgtaaataaaggcctttacttgtttgataaggggggtaaagacccttatttagaattacctggctctatatggctactgcacttttggctaaactttaatgatgaacacttaacagcatatcgctacttttttaattactctaatgttcagcattttgaaaagtctaaattgatagatgactgttatgaagatgctaagcgcttagtcaaaagcgaaattggtaacgttacaactatcaaaaaagacatggattgttttttaaatatgtatagcaaaaaagttaaaacaacaacgaaaaaagtcgatgaagatcatttcacctctcctcttgctgaacttaatttagtacaggataacggccgctctttttatgttagtaacttaactgaaaggcctgaactacctattgaaatatttgtttatgccctactggagttttttaaagtagaaacaactgaatctaaagtgagcactatcgattttgattcgttacttactaaaccgtgttcgcctggtcgaatattcaggttatcagaatcaggtttagggcaaaagctcgatgaagcgcaagaatacactaataaaaacatttcatgggtagactctttaggacttagacaagtaaatatctctgaatcagaaaagaataatactattaattacttaaatgaatattacggcaaatacaatgtctgaatctcttattgcaattaaccaacgatataaaagttccactcgcattgatgttgatagtgctaatttaaaaccttttatagacgactttattgttcatggtacagcaataaatgtactcgatactattagccgtgagttcgaaggtagtatacaaagagcgtttacaattaccggtccatatggttcaggtaaatcgactgtagctttgtttttatcatgcttattgtcggtcgattcagaacaaagaaattacgcactaaacaaattaaatagttctcaaaaagttataactgaatttgatgataggtttaaaattactaatggctggaagaccattaaacatgtttgtggcctagaggcaccagcaaatagtattttaataagcttattaagagcgtttgacgttgcatttgatgcacaagatatacaagctcttgatgatgaccaatgcttagcacagataaagtcacttctacaaaaacaaactgaaagcgaagacggcgttttaattttactcgatgaaatgggtaaggctctagattatcaatcacgtgcaaataaagacttgcacttatttcagtcacttgctgatattgttcaacaagctaagcgccctgtattactggttggctttttacatcaagcattctctgattacgctaaaaataaagatgtaaaaacacagcaagagtggagcaaagttcaaggccgttacagagatttaagtttcaatccttctattgatgaatcattagtgcttgttggtgactcaatttttagagcacctaaagttgttaatgcgcttgaatctaaatatgaaagtttagttgatgtcgtaagctctgtatttacgaatcaaaacaaaaatgttgatgccttaagcaacacactacctttagatcctattgttagcttattgctaggccctgtatctcgtcgtcgcttttcacaaaatgaacgaagtttatttggctttttagcatcacacgaaaaatatggtttcagagaatttttagaatctgaatatagtgagcttaatgaagagttaagtttatatcgccctgaaatgtattggaactatctgcatcataacttacatcatttaattgttacttctcaagatagcaaggcgtggcttgagggctgtgacgcaatttatagagccgaacaaaaaggtggtgaattacacacagttattactaaactaattgctttacttactatttttggttttcatcaccagttacacgccaaacgcgagtttataaaaaaatattttgttagccgcggttatgaagctgacgaaataatgcaagctttgagtgatttagaaacctggacggttataatttaccgacaaaaacacgatgctttatttgtgtttcaaggtagtgatattgacataaataatttaattcacgaacgtattgaagcaataagctatggtgttgattggacagaaatatgtgatataccacagaacattttagcaacagctcattaccacaaaacaggaactatgcgctgggcaacaaccaagcttataaacaaatacgacgttgctcttattaaaccatttgtgacccctccaaaaacgggggaagcttttgctacgtttattttatgtgtgaatgacgatattgctaaagaacttaaagcgcatgagaagacaatgccttttagtattgttggtaagtttaaagacttttcaaatttaaaaaatgcagctattgaattaattgctttaaaacaaatactcaaagatgaaaagaaaatatctcatgaccttatagctaagaacgaacttgagaacagaattaagtttgcacaagcaaatgtagatcatgagctgcaatatgtttataaaaatgctgattggtttcattgtggtaaaaaattacaagcagcacctttaacatctatcgcttcaaaaattgcaaatgatttgtttaacaagtcacctgtcgttataaacgagttagttaaccgctctaagccctcgggtagtgcgaatagcgctattcgtaagttaatgaacgccatgtttgaacaaggcgatgaaaaagatctaggttttgatgaaaaggcatttccacctgaaaaaggcctttatctttcttgtctaaaaagtaaaggttggcactgtgaaacatcagaaggctttttatttccagctgaatggagtaaagactctcaaaaagctaaccctgagatgtatgagttatttaaaagtggctttagctttataaaagaaaactcaaaaaacaaacaagtaacattagctgaactctatgatttttggatgcgtcctccttttggtttaactgcaggcttatgccgtatttatggtttagctttgttaaagtctcttgaagggcaagttgctttttacgattgggattcgactaaccagttcatttttattcctgaacttgatgaagagctagtaaacaaaatatacaaacatccaaatgaagctggggttcgttatttcgagatatctgaaatacaaagtcacttactagacaatttagctaaggcgacactaggtgaagctaaaaatgacgctgctattttaaacattgctaaacatattgtggggattgttcataagctgcctacatgggttaaaaagactagtggcgaaagttttactggtgataaaggcaatggtttaacaaagcaagctcgtgactttagaaataaagttattgcagcaaacgatccttacaaattaattttagatgatctacctgctgtatttgggtttaagaaagatgaccctgcacttgaagacaaacttggaaattacttaaaaactgctattgaagatttaagtgctcagcacgatattttgctaagtggttttaagcaaataatagttcaaatgttaggtgaagattttaatcaaaccctaaaagagcgttgtgattttgttgaaaagatcgctaagcgaccaaatgtaaaagagcttgcaaagcgtatttcacagcacattgatggtaaaacaaaatttgaatttattattaatttagccacaggtacaccagaacgaaattggaccgataagcatttacgtaatggcctagatgaattacaaaatttatgtgttcagtttagaagaattgagtcttttggaaatattcaaactcaaggaaattctaagccactagcatttattaccaccgatagtgaaggtaatcatcaagaatttggtggatttattaagcacaatttagatcaagataaagacgtaacagctgctgttgaaaatattcaaactacgattgttaatatgtcgaaagagaaacagcttgcagcattaacgagtttgttaacgaacttgatggaacaaagtgagtcagaggtagctgatgactgaaaaagttaaacacgtacttgggctttctggcggcaaagatagcagtgctttggcgctgtttgtaaaggaaacataccctgaattatatgtagaatacttttttacagatacagggtatgaattgcctgaaaccaatgaatttatagaccaactagaagagaagttaggttatatacataggttaaatgctcgttcattaaataatattgaaggacgtggcgaaaaagattttgcccacttattaaaagagcatggtaactacttaccttcacaaagagaccgctggtgtaccgtacaaatgaaactaaaaccatttgagcaatggttagatggtttcatcaaagatggatacaaaataaagaattatgtgggtattcgtgctgatgaacctgaacgtacgggttacatgactatagagaagcctatagagtcagtattcccatttagagagcatggcatcgttcgtagtgatatcgaaaatatattacaacgtaatggtttagaactacctgaatattataagtggcgctctcgctcaggatgtactttttgtttttatcaaaggaaaattgaatgggttaagctaatggaaaagcaccctgatctttttgaagaagcaaaagcatttgaaaaaggtgatgatgaaaatactactgttggcgagcgcttttattggatgggccaaggccaacctttagagactttagaagatcccgctgttcagaagcgtattattgaaaatcatgagaaaaaagtagctcgtttcaacaaaaagaaacgcagaaatgctttgttaggtgattttgaaggttattgcgagtttaatgaacttgatgatatttatgacgaagctgaaggcggtggagcttgtgtaacttgttataaataaaaagaagcggctcaataagccgctttttttatcgctgtgatcaagaaatcaatattatcggttgtgatttcatgagtgaaactgattctaaaggtatgctcagcttgctctcgagttaagcctaatgcggttaaaacatgtgaagcttctatctcttttgaagagcatgcagatccttgagcaagacaagcagaattctcattatcacgaaccaatacacccacattagttttcggaagagataatgaaagtatgtgaggtaaaatattaccttgcccgtttatgagatattcgatttcattttcttgtaatttttttaagaagtaagatttaggtgcgccattttcaaaatcactgtacgtttgtgggaatacttcaattgctttaccaaaaccaataattaatggcgctgcaactgttccacctcttagcccatcctcttgacctgcgccatgtataactggaaggaggttacgttttctgaggtcacgaatataaacagcaccaatacctttaggtccaccaactttatgtgcagaaaatgacatgacatcaatattcatctcatcaacgtcaatatctgttttacagaaactttgagctgcatctgagtgaaagatgataccttttgaaaagcaaagctcaccaatttctgcaataggattaattgtgccaagttcattattcacatgcattatagagacaagagctgtgtcttcttttattactgctctaacactttcagctgtaatcaccccattaacatcaggttttacaagtgaaatctcataacctagtttttgaaagtaatcgcagattgcaaaaatgcatttgtgctcaattgatgaaatcacaatgtgttttttagtttttaggttttcatcaccaagcaatatacttttaaaagctatattgtttgattctgttgcgccactggtgaaaactatttcacttggaaaagcccctatttcatcagctaatagctctcttacctcattaatcttatctaacgcagactcacctaaaatatgactagatgcagagtttgcataacaactctcaaacgcgtccatcaatgttgattgtacttcaggtaatattggataagatgctgctgagtcaagatatatcataaacaagtccctaatatttagtattttaaggttatcacaagcgagcctaggtcacagacactttttatgctaaaactttaaaaggttatttagtgtaaaactgaactttatggctcaaggtaagattaataagcatgaaaaatataggttttttcgacaaatgaaattatagcttctattgtaatcaagtgaaattaagtgaaaagttaactaaaaagacgtacaataattttacaactttagttttatcagactaaaaatcatcaaaaccctgtgcaatttttaaagataaccacgtgttattgagcttttaaggatatcaagctctatgcaaatacctaatgttgaacttcatctcccgattaggcggttactggaagcagtagccacttccaacgtggagataaaatatgaaaaaattgcgctcattaaggcgtcatcattacgctagactaaaaagtaaaattgttaaccaaacttactttggtcatagcaaaaacgattggtgctgtgcacttgaaaacaaaattggtttttatgctaacactgcgaagtgtattacttctgcacttagctcaaacccaagaaagaataaatggaattcaaaaaagcatcaattaacactgcaagaacgcagaagtgaatttgatgcaaaagagtttaattactaaagctaaaaggtcggcaattgccgaccttttttgttatttgaacttcgaaaacgcagccaaacgactatatcgttcttctatgcaaaatggcgtttagccatgtttctgtagcgcgctctgggcgttggtcggcgctttgccacgacttgaggataaataggtctgtgcctttaattatgctctcaagggcttgttcgtttagatcggtaaattcgcgaccgttgtgttcgcgctcgccgtcgccgtatttaaacgatacatacacgatgccttgtggctttaatgcgcgggcaaggttgttgaatgcgtcggttaaatcgttttttgctacgtgaataaggcttgcgcagcaccaaatgccgtcgtatttggcaacgtcgtttagctctagaaagctgcttactgctacgtcttggtttaagtattctgacgccagctttgccatagctgggctgatatcgaatgcatttacgctataagcacgctctttaaagatgaaggcgtcgcggccagagccacaaccggcatcgagtaaagcgcctttttttgggatcagcggtaagaattcgtcataaagttcattgaggtctacatcgagtgtggcatctacaaatgcttgcgcattttggttgtagtattcgacggttttggatgccattttacttcctttataggggcaagattgcttggcgctaaaataccattaaagctaggtactaaaaagatatcaaattgattttaagtatttttggcgggaaatatttttatactccagcgtaatagatgaggcacaatattgaagaaataatactcacaaagtggataagagacgctgcgctttagaggaaaaattaataggattaactagtatctcattgtcttctcattcacttctctttgtgcaaaaagatatttgaaccacagagttcatcgaggcgctgcgcgctacacagagtaaaaccaatactcacaaagaggctaagagacgctgcgctttagagaagtaattctttatacctcattgtcttcctctgtgcactctatgtcctctgtggttagagaaaatctaatatgtctatgaaaatatactggcagtaaatacgataaatcctcaatgccttctcattcactcctcattgtgcaaaaaatattggaaccacagagtacatagaggcgctgtgcgctacacagagaaaacaaatacacacaaagaggctgagctttagagaagtaagtttttatacctcattgttttctctttgtgcataaagaacctacagtaaataaatgcctgtttgacactatgtaaaacggcagctacatattttctctatagttttatacttttaactcaacaacattgcacaattggcaatttactagcactattatgtattaagaagactttagtctgaggtaagcatgcacgacaagcaaactcattgccagccaacaggttgcaataactgtaaagacaaactagaacttggctttgatttcaccatggcttttcagcctatcattgactgcgcagcaaagcagatctttggttatgaagcattagttcgcgggcctaataatgagtcggcttattctgttatctcacaagtgaacgatgagaaccgctataccttcgaccaactttgtcgtatcaaagctatttcgcttgcagcaaagctaaagcttgattctattttgagtatcaactttttacctaacgcgatttacaaacctgagcgctgtattagaacaacccttgaagcggctaaacaatatgactttccggtagagcagattatgtttgaatttaccgaggttgagcaagttgaagacacaaatcacattaaacgtgttgttgaatattatcagtcgttggggtttattacggctacggatgattttggttctggttattcgggtttaaatttattagctgactttcaaagcaatattattaaacttgatatggcactaattagagatattcatttaaataaaactcgtcaagcaattgtgagccattgtattgcgatgtttgatgaattaaatatcactacgctggctgagggtattgaaacgattgaggaatatcaatggttacgccaagctggggtgagtttaatgcaaggttatttatttgcacgtccgggttttgagagtttgcctgaggtagattttagtctgttgcgtgaggcttaaaactcgcgtcaacccgcatcagatttatatcaaaaacctaatttacagagagattataagacgctgcgctttagaggcaaatcagtaagttcttttactattggctcattcacttctctttgtgaaataaagatttgaaccacagaggtcaccgaggcgctgcgcgcttcatagagacaccaaaattcacaaagaggataagagacgcttcgctttagagaagtacactttaatacctccgtttcttcctctgtgctctctatgtcctctgtggttcaaaaaagatctggcaaactgctcttcttgataaataggttacttggctgtgtcttagaagaaggttggtgaagttaatttgggtttcctcattgtcttctcattcacttctctttgtgaaataaagacttgaaccacagaggtcaccgaggcgctgcgcgcttcacagagacaccaaaattcacaaagaggataagagacgcttcgctttagagaagtacactttaatacctccgtttcttcctctgtgctctctgtgtccttatatggactccccgttttttgtcaacggagtatttattaaataaagattagatgctggcttatatacggactctatttggggagctacccctggtcactttaatgtattcgcccctttatgacttttctctgtgacggtattttctacctgaacacggaacagtctcttaaaggtcagtcttaccctggttttaaacgctctttattgacaataatttaagccgttaacaactttggctgataacattcgtttttctttagcatggcaaatgcagttctgattgttttattcgccaatgctattgctgccactttcttaccgcgtcttgcaatcaactttttaagccattcatccttttctgtgcgacttgctctttttataacatttgaaacaaccgctagtgcaccttgatataacgtgctacgtaacttcttgtttgctgatttttttgaaattgagccaattttttctttgccaccagagctatgctgcacaggcgttaatcctgcacaggcagacgcttctcgtccatttttaaagtgctctatacaactaaagtaaactttcaacatcattgaacctactggtccaacgccttccaattttgacagccgctcgcatactgcatcatttttgatttcttcttcaattagcttttctagcgctataatttctttaacaactcttttgaattgttcatttactatttttagagatgctctaaatgccatcggtacattaaaacttgtatcctcgagcaaactttccactgcatctattaacttactatcagacttggctatagggatgccaagttccaacaaacagcctcgctgtaggttccccaaggccactttttgttttacaaaatgctctctcattgctgatatggattgtaagcactgctcatttacacttaataatctactcggcttaaccgttggttgctgagctgcaataccaatagccaaagcatcattcgcatctgttttttggccttgtctaaatgcttttacgacgcgtgcagacattggtttaactatatggccagcctctttcgcttttcttgcccaataatgcgtaccaccacatgattccattgctactaatgattgtttttctgataccaataactgaagtagtttttgtctagatacttctttgttgtatataacttgtcgctctttacctattttacaaacttgataattattttttgctaaatcaatcgcaataacgttaagattcaccatgtatggactccttttgtaaaagttttgtcgcttattacgttacccccctgtgggaggggagtccatacatctctgtggttcaaaaaagatctggcaaactgctcttctcgataaataggttacttggctctgtcttagaagaaagttggtgaagttaatttgggtttcctcattgtcttctcattcacttctctttgtgaataaaaatattggaaccacagaggtcaccgaggcgctgcgcgctacactgagacaccaaaattcacaaagaggataagagacgctgcgctttagaggactccttgtctttctctgtgctctctgtgtcctctgtggttcgaaaaaaatctagcaaacagttcgtctcgataaataggttacttggctgtgtcttagaagaaggttggtgaagttaatttgggtttcctcattgtcttctcattcacttctctttgttaaataaagatttgaaccacagaggtcaccgaggcgctgcgcgctacacctagacaccaaaattcacaaagaggataagagacgcttcgctttagaggattcatattaagtagcagtctatttcgcatactcattgtcttctcattcacttctctttgtgaaataaagacttgaaccacagaggtcaccgaggcgctgcgcgctgcacagagaaggtaatttcacaaagaggataagagacgcttcgctttagagatctccttgttttcctcagttctctctgtgtcctctgtggttagaaagagattacaattaactgatgtacccttattcatctctctgtgcgcataaaaaatcctacgggctgatttaagattaagagcactaacagatgcttttagggcgctttccaactttaatttgtacctttttcaatttaaaaataacaacttactgattgccgtaattacaatttatctgtaacttgtgtcgcccatttcgctacgcactactataatattaagcgaaatcaacattttcatactaaatactagggatacacaatgaaaaaacttcctattgcattggctctatgtgctgcttttgtgtctgcaaacacaatggcagaggttcgcataaatggctttgcttctattgttggcggtaaagcccttgacgacgacgcaacgctttatggttacgatgatgatatttcgtttaaaaacgaaagtatgttcgcattacagctttctgcagatttacaagaaaagctaagcgctacggcacaaattgtagcgcgtggtagcgatgattttgatgctgagtttgagtgggcttatttaacctatgagttcagcgatgagctacaagtgagtgctggtaaaatgcgtgtgcctttttaccgttactcagacttcttagacgttggttacacataccgttgggttcgtccgccgcaatctgtttataaccttccgttttcaacgtatgaaggcctgagtctgttacacaacacacaattaggtgattgggattcaaccgttcaagttatttacggtagcttcgatggcaacattgctgtggtatcggttaatggcgatacagagcttaatgatattgctggtatcaactggacgatgagctacgactggttcagtgctcgtgctgcatactttgtagcaaacacaacaattgcaatcgaaaacgacaccgatgcaggtgttgcgcttaatggccttgagcaaacgctaagagctgcgggctttgttgatcaagctgatgatattgctgttaacgaagatgatggctctttcttcgctgtgggcttttcgattgattacaacgacattctatttgatgctgaatacactgagtttgaagtagaaaacagcgcccttgctaaacaaactcaatactatacctctgttggttaccgtatggatgagtggattgtgcacttaacttacgaaaataacgacgacaaacacgatagcaaccgctacaacgcactacctgcagtaccagctttaaacgcaggtattaatcaggtgcttgagggcgtaaaagcgaagagcaatgtgtataccattggtactcgttatgacttccacccatcagctgctttaaaagtagatttcagccgctttaaagatgatattacagatacagaaaccgacgttgttgctgttgctgttgatttagttttttaattggagtttatgatgaaaaaattattaatcgctacagcactcaccgtttgttcgcacgctgcatttgctgatgttgctgttattgtaaaccctgcaaatggcaatgctattgatgaaggaactatcaaaaagatttaccttggcaaagcaaagtcgtttgatgatggcaccaaagtaaacccggtaaaccaagacggcaacagcgtaagcgacgagtttaacgataaggtggttggtaagtcgagcagccagcttaacgcttattggtcaaagctggtatttacaggtaaaggtacgccacctgaaaaactagcaaacgatcaagctgttattgattttgttgcagccaatagcgacgccattggttatatcgatgcagcaaaagtaactgataaagttaaagtagtaggtactttttaagtgctagcttaaatactcactacgttaataaaaaaccaggcgatgcctggttttttatgcgcataaattactcaactttaaattttgcagtggcgtcgagtaacgaatcagaaaggtaatgaaggttcttcgctacatcacgtaccgccgagagcgaatccattgtttcttcaaacgacatatgcatattcgacacgttctcaaccaccatacttgccacagatgtttgttcttcggtggctgcggcaatctgagagttcatgccgttaattgataatatctgctcagaaattttatcaatagattgccctgtattctcagcagcttcagcattgtttgtagccatatctcgggctgagttcatagcagttaccgcatcgcttgctgcggtggttagcgttgtaagtagctctctgatttcgttagttgagtgtgatgttcttgaagcaagctcacgcacttcgtcagcaacaaccgcaaaaccacggccttgttcacctgcacgcgcagcttcaatagccgcatttaaagcaagtaaattagtttgctcagcaatcgaagtaatgacgtttaaaatttgcgttacatttttggtgtcattcgccagctggttaattgtcgaagcagcttggttaatttcatcacttaatgtacgtgactcacttacagagcgtcttatttgcgttcggctttgctctacttcccgttctgcggtttgcgcagcttgcgatgcgtttgccgctgagtgagaaatatcagcaacactttgacgcatttcttccatcgattgctttacgatttcggcatctgatgtttgtttagttgttgcacgctcggcgcgttccataccttgcacaagccgggttgagttttccattaatggctcacacaccgctattacttcaagtacagcagcctttagtagctgtataaaggcattaaaattaattgatacctgacctatttcgtctttagcgtgtacttcaagttgagtgctcagcgagcctttaccatcggctaacaaacgtaagttacttgccgcagcactggctgatgagccaattccacgggcaatccaaatcgatgtagcaattagtaacagtaatgaaactaccgagacaatcagcattaaattaagcgcattgtctgaacgagctttggttgcttgtacaagctcaaaaaagcgatcatcagcgcgagattgagcacgcttaaaaccttcaagcacggcttcgtactgtttggttttttgttgggcttgctgctgaattttgctgaagtcggcagtaccttcaatcatcgagcttgcaatactcgaagacgtttgtgcataaagctctaactgtttttttgtatcgctattcacgtagccatcgttaatgctgatgatgtcttgtaggttttcgttaatctttttataggtttgtgctgcgctatcgactaaatctgattcaccaaatgtcactgcctgtgtatatagttcgtctagtttttcgagtaaggctacattggcggtagtaagttttacgacttgataagatgacttttctaattcatcgagtgaaattttgttatcgttcatagcgataaagttggttaccactataatcacgaatgccgttatggcaatgcatgttatggcatgtatcttttttgaaatgcttaagttgttgaaagagaaacctgcagacatttaatccacctttgctgtcatagtcttaatattatcgcccgatttccctaaagtattaactatatttatatattttcaggtttttttcgtattttgtgccgttttttaggatctggatgaagagcgagaagataatattcaaaaagacaagagctttcagccttcaactctgagatgcgcgaaacaagtttcacgcctacgcgtagcagcgggtttataccgtgtcatcaggtgctagattttgggcactagtactctttcacatatattttgatcagttgcccctacttaaattcaggtaactgatctttttcaatcaataattcaatactcctgctttttccagtaactgatgttataaatttcttcttcttaagaactgaaatcattgaatgaacacttgaagatgcggttccaaagtagcgctcaaaatcactttcagcaggcgcaatcccattcacttttgtgtagtaataaataaatgctaaatactgaccttgctttgctgtaaacagtggcgactcttctttattcataatgaacttttaccctaatcaacgatcctttaactcatataaacttacttaatattgttatgaaccgaaagtatattgttgaattatcagaagaagaaaaacaagaattagtagactattgcaaaaaaggcatggtcaatgttcgaaagtacaagcgggctgctattttgttaaaagctgaccgttgtagatatacaacagagcaaatatgtgaagctgttcaagtgagctcttccaccgtatttcgagtcaaacgccagttcgttgaagagaatctagcggcagctttgaatgaaggtgcacgaagtggtgcaatgagaaaaacttctgcgaaagatgaagcaacgttaatcgccacagcttgcactaagccaccaacaggtcacgctagatggacattatctttacttggagagcgattagttacattaactgatttagatagtatctcgtatgaaacaatacggaggcgtcttaaagaaaatgcactaaaaccatggcaaaaaaagatgtggtgtgtggcgacaatggatgctgaatatatcgcgcggatggaacatgtgctcgagttgtatgctgagccagcagatgagttaaaccccataattaactttgatgaggcgatgaaacaacttgtagatgatactcgaccggcacaaccaatgaagcaggggcagactaagcggttagattatgaatataaacgtgtaggtgtggccaacttatttgtattcttcgatcgccatcgaggatggcggcatgttaaagcaacagaaagaaagacgaaaattgactttgctaattgtatgagggatttagttgatcttcattatccacatgcgaacaaaataaaagttgtgttagataacttatcaactcatacagaaggagcgttatataaagcattttctccacaggaagcacgccggattttaaataaactagaattacattacacaccaaaacacgcgagttggttgaacatggtcgagatagaaattggtaatatgaataagcaatgtttagatagacgtatagcaagtatggaagaactaaagacagaactcgcggcctgggaatggagcaggaataaagaaagaacaagtataaactggctatttaatgttgaatcagctcgtgaaaaacttgagagggcttatggtgccctcaactagtcagaacttgtgtgatgaagtactaggcgctaggacgcgatgtaaaatcgctactacctcgaatctcgcatctcataactttcccctttccccttgaaactttctcttttttaatggcgttctttggggctgatctgtataatccgcggcctattatttaccctattgcttgtttattttcgcagtttctgcgcccataaccctgtcagtatttttctaggaataattcgttgatttcaacagcaaatatcaccatgcagtttggtgcagagcctttgtttgagaacatttcagctaagtttggtaatggcaaccgctatggtttaattggcgcgaatggctgcggcaaatcaacctttatgaaaattctaagtggtgcgcttgtgccaacctctggcaatgtgtcgattgcaccgggtttaaagctaggtacgcttagccaagaccagtttgcgtttgagcaatacactgtagttgatgcggttatcatgggtgatgccgagctttggaaagtaaaacaagaacgcgaccgtatttattcactgccagaaatgagtgaagaagatggcatgaaagtcgctgagcttgaaagcgtttttgccgaaatggatggctacacagcagaaagccgtgcagaagaaattttgatccaagcgggtattgagcaagagtttcattacggcttaatggcgaacgttgcgccgggctggaaactacgtgtgcttttagcacaagcgctgtttgcaaaccctgatattttgctacttgatgagccaaccaataaccttgatattcacactattacttggctagctaacgagcttaaccagcgaaagtgtacgatgattattatctcgcacgaccgtcacttcttaaactcggtgtgtacacacatggccgatatcgactacggtgagctaagaatttacccaggtaactacgaaaagtggatcgaagcttcaagcttacaacgcgaacaactgcttgctgaaaacgctaagaagagcgctgaaattgacgagctacaagagttcgtaaaccgctttggtgctaacgcatcaaaagcaaaactagccagctctcgtgctaagcgcatggataaaattaagcttgatgaagtaaaagcttcaagccgtattagcccatcacttcgttttgacgaaggcaaaaagatgtatcgccaagcattagagcttactaagctaggtcatggctttgagggtgaaaccctattcagtggtggttacttattgctagaagccggtgctaagcttgcggttattggtgaaaatggtgttggtaaaaccaccctattacgctgcctagtgaatgaattacaaagtaacgagggtgtggttaagtggtctgaaaatgccagcattggttattgcccgcaagacagcagcaaagagtttgataacgacttaactctatttgattggatgtcgcagtggcgtaccgctaagcacaacgatttaatggtgcgtgctatgttaggccgtttattattcaccgcagatgacgctaacaaaaaagcgcgtaactgctcgggtggtgaaaagaaccgtctattgtttggtaagctgatgatgcaagacatcaatgtgctaattatggatgagccaactaaccacatggatatggaagccattgaagcgctcaataatgctttaaaagattaccaaggcacgcttatttttgtgagccacgaccgtgagtttgtatcgtcattagcgactcgtatcatcgatattaaagataaaaagcttatcgattttcagggcacgttcgacgaatatatggaccatgttgcgcaacaagcgcagtaagcttaaacaggttttatagctattccctttatttggtggctttggtggttctgtttagatttaaacattgaaccactaagtggctacgtgctccgcaaagaaactaaattcacaaagaggataaaagacgcttcgctttagaggatttaaattaagtaactgtctatttcgcatactcattgtcttctctttatgaaaaagatattggaaccacagaggacaccgaggcgctgcgcgcttcacagagaaaacaatatttacaaagagattatggtttctccttctcttactctgtgctctctgtgtcctctatggttagaaaaagatccagcaggctaatacaaatttaataattatctgaagtccgctcattcacttctctttgtgaaaaaatattgggaccacagaggtcaccgaggagctgcgcactacacagagaaactaaattcacaaagaggataagagacgctgcgctttagaggattctaattgagtagctgtctatttcgcatactcattgtcttctcgttctcttctctttgtgagtaaagacaattgaaccacagagtacatagaggcgctgcgcgctacacagagaaaacaatatttacaaagagattatggtttctccttctcttactctgtgctctctgtgtcctctgtggttagaaaaagatccagcagactaatatacatttaataattatctgaagtaccctctttcacttctctttgtgaaaaggttattggaaccatagaaagcaccgaggcgctgagacgcgatgtaaaatcgctgctacctcgtatctcgtatctcgtatctcgtaactttactctttcccctcgtaactttccccttgtaactcgctaacttccctgcattaaaaaaggctacatattgtgtagcctttgtacttaaaggaattttaaattaaatatcaaagcgatcggcattcattacttttacccatgcgtcgacaaagtctttcacaaaacgctctttgttgtcgtcttgtgcgtaaaactctgcgtaagagcgtaggattgagtttgagccaaacactaaatcaacgcgtgttgccgtccatttagttacacccgtgctgcgttcaattatgtcgtaatagcctttacccagtggtttccaggtattagccatatcagttaggttaacgaaaaagtcagtactaagtgtgcctacgttatctgtaaatacaccgtgtaaagtgccattatgattagtaccaagtacacgcataccaccaacaagagcggtcatttctggtgcagttaagcccattaattgcgtgcgctctaacattagctcttctgctgaaacagcgtaatcttccttgagccagttgcggaaaccatcatgaattggctcaagtacgtcgaacgagtctgcatctgtcatctcgtccgtggcatcaccacgacccggcgcaaatggtacagttacatcaacacccgcggcttttgctgcttgttcaaccgctgctgtaccacctaaaacaattaagtcagctaggcttactggtttacttaaactcgcttgtactgactcaagtgcgcttaatactttagctaaacgctttggttcattacccggccaatctttttgcggcgctaggcgaatacgtgcaccatttgcaccaccacgatgatctgaaccacggtaagtacgggcgctatcccatgctgtagtgattaaatcagcttggcttacaccacagttaagtagcttggttttaagctcgctaatttcgctgtctgataaggtgtaatccaccgttgggatcggatcttgccagatcagatcttcgcttggtacatcggcacccaaataacgtgatttaggacctaagtcgcggtgagtcagcttgaaccatgcacgtgcaaacacatcactaaagtattcaaaatcatcgttaaaacgctcgataatcttacgataggttgggtccatcttcattgccatatcggcgtcggtcatgattgggtttaaacgaattgatggatcttcaacatcaactggtttgtcttcttctttaatatcaattggctcccactgccatgcacctgctgggctcttcttaagttcccactcgtagttaagcagcaagtagcaataaccgttatcccatttggttgggtgagttgtccacgcgccttcgatgcccgacgtcatggtatcgcgaccaataccgcgtgagttatgattgttccaacctaggccttgctcaaacacatcagccgcttctggctcagggccaacgttttcttcgctaccattaccatgagttttacccacggtatgaccacccactgtaagtgcggcagtttcttcgtcattcattgccatacgggcaaatgtttcgcgaacttgttcagccgttttaagcggatcaggattaccattcaccccttctggatttacataaattaagcccatttgtactgctgccaatgggttttccatagtgtctggtttttctacatttgaatagcgctcatcactaggtgctaaccattctttttcagcgccccagtaaacgtctttttctggatgccaaatatcttcgcgaccacccgcaaagccaaaagtttttaaacccattgattcgtaagccatattaccggctaagatcattaaatcagcccaagaaagtttgttaccgtatttcttcttaattggccaaagtaaacgacgtgctttatctaagttggcgttatctggccatgaatttaatggtgcaaagcgttggttacccgtaccaccgccaccgcgaccatcttctaaacggtatgaacccgctgagtgccacgccatacggatcattaaaccaccgtaatggccccagtcagctggccaccattcttggctttcggtcattaggttttttaaatcggttttaacggcttcaaggtctagagatttgaatgcttctgcgtaattaaagtctttgccgtaaggattcgttttgctgtcgtgttgatgaagaatgtcgaaattgagtgcgtttggccaccagtcggtatttgattgagcggtgacagtgttactaccatgcattaccgggcactggcccgtttttccattactcattatatgctcctcataagctaaaaatatgacgaaacgctaaaagttcacttttatccctttcgtcataaagagagattttctaatagttatgaataactaatagcaaataagttcctgttgtttaaaactataggagttgtactttgataaagctagattaagaacatggttttaaatcgattgcaccgatagaaaaatctgatttgattcattttgcaaaaccgtccattttataagggtattattaaacagcgagtagcccttatgaaaaccattaatcctgacgttgctagacaactaagcattaacttttttatcgccaatttacctattttgatgttaacgggcctcgtaatcgcatcgcttgtaggattaacttttcgaagcatggttatgttttggctggcactactaataacacctataagcctaaattatttatattctaaaaaacgtattaagcagttttgcaaagacaacaaatgcactgatatttcttgtcttgccaagcaaactgattaatttttaattttattacccagtcaccagattatttagcctgcaacttgtttaaaaattaattagttatgcaagtttttgcggcaatttgaaagtgacggtaacgccgttatttggcttgctatcgatgctgacttcgccttgcagtgcttgcgttgcaaggttataaactatcgacatacccaaaccactaccgccattgccacgtttggtggtgaagaatggctcaaacactttatgcattacatcttcactcatgccatgaccattgtctaaatagcaaatagagtaggtatcgctttgtttatcaacggttactgatattgttattttattttgatctctgcccacaaacccatgtacacaactgttgttaacaagattcagaaaaatttggcttaatgccccaggtacagttattagcttaaggtcgtcattacattgaatatcgacttcgatattatggcttcgggtcaatggcattaaactatgtataatattttcaaggtagtctttgatgtttgtttcaagtaagttcaaagatgattggtcaacagcagtttgcttaaaatcactaattagctttgccgcgcgctcaagatttgcaaaagaaatcttaaaacattcatttaagtgatttattccttcaagtaatgccgttttagttaacgtattagactctattaatttatttaaggtattaagtttatcttttgcggagctattcgcggtgactgcaatgccaattggggtatttacttcatgtgctatacccgctacaaggttaccaagcgaagccattttttctgattcgatcaacttttcttgcatggtcgtcaattcagataaggtcacttcgagcgtgcgagtacgctctgccacccgttgctctaataattgattggcacgttcaagctttgcattggttcgttcattttcttgagccgacagtgctctgccatataaatctgctaatgcaccgataaatgaacactcatcttcactccagtgccttgctccaccaatatgctcacaacaaaatattccgatcattttacctttatagcgaatcggcgcatcgagcatagcgccaatattaagcggtttcaggtagctttcactaaactcaaaggtggctggatcggtatgggcatcttctgcggtgatcgttcgctgggtatcgagcgctttaaaatatgctggatatgcatcgcgtggaagaaccagtgtctgaatttcctgattattctctctatcaagtaataatcggcattcaatggcggtgttttcggcatttaaaagccagatcccagctctgcctatttctaggccatcaagaacagcattaaggattaagcgttcagctaattcaacattaccactgtcaagatcagaggaaattgatactccatagagcagttggactagttgttggcgcataccatcaccttttagttttacatcaacttaagtctagacgaacatagccattcttaaagactgactttgaatttttaaaaaaccttttagtattaagtggttgttcagatagacacaggtatatttatacctaactcctgttgataccccttacgactttatgttgtttaagcagtttggccagctctcccccgagttggcttttttttgcctagtccccagtgctcacgcatgttaaagtgaacttagaattcactaaacataaataagttatgcgttatatcttaattttaatcacttttttaatgagctttcatacgctagcggcagcccaaaatgaacctgaaaaccgcccagcccttagtgaagccgaacaacaacaagcactgaataaccttcaagaaccaatgtataagcctcttttagagcgttatattcttgatgagttaaaagcagttcgccaagatcagcaaaaactgagagaagatgtcactaagcaggtcactcatacacagttagatacagccgatcgcgcgttaacctacacaacagacaccatcaataatgtgtttttcattattacaattacagcctcaattttggttttagttggttggaattcactgcgtgatgtgaaaaacaaagtagaagatattgtaaatacgcgtgttagtgccatcactaaagaatacgaagagcgcttaaaagttcttgaagaaaaactacgtgagcgatctgaagagatcttattaaatcagcaaaaaatctcgatcactaacgaagttcattcactttggatgcgtgctaacttagaaagtgatgttgcaaataaagtagaaatttttgacgaaatattaaaacgtaagcctgaagatgtagaagcgattgcttataaagcagatgcactgttagaaattaatgaaacaggtgaggctattgagctatgtaatcaagccctcgaaatagacagtgactatggctatgcatactggcaacgtgcgtgtgcttatgcattacttcataaacatgctgatgcgatggccgatattcgtatggcacttgaatactcaccaaaccttcgtaatgagctattacacgaaagcgcttttgccagccttcacgacaacgacagctttaattcgttgttaaatgaaacggtttagcctaaccccatgtagcagcgggtttatcccgcgtaataggcgctaggatttaggttctaagacgcgatgtaaaatcgctgctacctcgttactcgcatctttccccttgtaacttgctaactttactcttgctaacttgaacccactaactttcacccataaaaaaagagcagctgcgctgctcttttctaatgcctaacgaaagaataacactttggttattttgccgttttcgacttgataactagttacaaactcggctcgcttatcaacgactttgggatcttctgaacaagtctctgatagttcatgatcaatcactatattaccgtgcacaatacgttttatcggtgaagacttaatgcactttaattttttaaacataataccgtatcgtgcaattagcttttctttaccggtaaacataagctcatttggaaacgtataaaactctacattttcatcatacattttgataaatgcatcgatattacgagcgttgtacgctgcaataacttgctcgattacagccatagattctcgtgactgacgagctttttcttgctgtttggctgttaaggcttctttagcttggtttactgcttttgttgcttcagcaactgcttcttgcttttcagctgcggttttaggttgcgcagcaggtgccgggtttacagagcctattaccttactatcatcagcttcggcaaccgtcgcggttgctgcttctttcttttcagtgtccttattaacggcttctggtttagttacttcagtttggcttttaattaccgcagagctttcgctctctgtagctttgtcttcaataaattctaaacgtgcaacatctttcttttctgttttttgttcggtttgttgctggctttgttcactagtttggtcactagcaaaaacctgccatgtgaatagtaaactgatggcaaaaaataacggtttcataattttcctaaatgcatcatgcctcaataaaggcgctaaggtagcaaattatagctgtttggcatagttttttaccaatattgctctactgtgatctgcccaggttcacgacgtctattgcggctaaaaccaagctctaacaaaatagccgtagtatcttttaccatttctggattaccgcaaatcataaactgtgtggtgtcgggagcaacaggacggtctataacttgaaataaacgacggtctttgatcacatctgtgatccggccattaaaacccacagtggctgactctcggctgactacaggcgaatagtaaagatttgggtactgatgctgtagcgctttgattcgctcttgatagcataagtcctcgttgaaacgtacaccatgcaccaaatgaacatgctcaaacttttgccacacttcaccctgctctaatattgaaataaaaggcccaagtgctgttcctgtgctcagcatatatagctgttcactacttggcacctcatcaagggtaaaaaagcctgtagcacgacgctcaattgtcactgagtcgcccggctttaattgtgcaagctgttgagaaagttgtccgtctttaacattaatcagataaaactcaagatcaggattatttggtgcgttcacgtaagaatatgcgcgtgctacgcgtttatcacccacttgcattgcaagctttgtaaactgcccagccgtgaatggctctacatcggcattaacaattaagctaaataatgagtcggtccaccatttaacgtctttaacttttgcttcaatccaattagacatacaaaccctcgagtattgttcctctattaaaggtggcaacaattgcttgaattttcaagttttaaggggcggttgcgagatgcaaactggattttacgcgagataaatacgcagctataaaaaaagccgcataaatgcggctttgaggttagtctcacttcactttgggcgtgtttccaaatttcagtgaatacgttaccaaggaacttatttaaattgattctaaagcaattttaaccatttcgttaaaagtgctttgacgctcttcacttggtgttgcttcaccagtgattacgtggtcactaacagtaaatagtgccatcgcttttgcgccatactcagcggctacgccgtacatgccagctgtttccatatcaacagcaagtacgcctagcttgtctaattcttgatagaatgtgttatctgcttgatagaatgtatctgttgtaaatacattacctaccttcgcttcaatgcctaattcttttgctgcgtttacgccgttaagtaataaaccaaaatcagcaatagcggcaaagtcgtaaccacgcacgcgtgcacggtttacatttgaatctgtgcttgcaccttgtgcaaagataacgtcacggattttgatgtcgctaccaataccgccacaggtaccaatacgaattagatttttaacaccgtaactaacaatcaattcacgggcataaattgacattgatggaatacccatcccagagcccataatactcactggtttacctttgtaggtaccggtaaaaccatacatattacgaacgcctgttacttgttttgcgtcatctaaaaagttttcagcaatgtattgagcgcgaagcggatcacccggcattaataccgtttctgcaaattcgcctacattggcactgatatgaggagtactcattattggtttccttttttgttcgctaatagctcatctttaaagctatcaccgtattcaagtgcaggaagattaaaccactgggcaagggtttgacctatgtctgcaaaactagctcgttctccaagcggggtgtttgtcattcccggttggtaagcaagtactggcacgtattcacgtgtatggtcagtacctgctgctgttggatcacatccgtgatcggcagtgatgattaacacatcatcgctatttagctgatttaagatggttggtaggtaatcatcaaactcttttaatgctttagcatagccgactgcattacggcgatgaccgtacttttcatcaaaatcaactaagtttgtaaaaatcaaactatgatcaggtgcacttgcgatgacttctgaggttttctcaagtaagttcatcagccctggtgctttatgtttttgggtgatgccttgatgcgcataaatatcggcaattttaccaatacttatcacttcaccgccgtcttgcgataatttatctagcaaggttggcgacggtggtagcaccgaatagtcacgacgattacctgtgcgggcaaaatcgtcacggctcgaacccaaaaatggccgcgcaatcactcttcctatgttcatttcatcaagcagcgcccgtgcgatttcgcaaacctgataaagtttctccagtccaaatgattcttcgtgcgcggctatttgaaacacgctatcaactgaggtgtagcaaatcggcatgccagtttgcatgtgctcttcacctagttgttctaaaatggttgttcctgaggcatagcagttacctaaaatgcccggaataccagcacgagcaattagctcgtcaacaaattcttgtggaaaacacggctgtgtgtttgggaagtaaccccaatcaaataacacaggtacgccggccatttcccaatgacccgaaggcgtgtctttaccacttgataactctttagcgtaaccccatgcgccaataggtgcttggcggtcactgactaaacaaggttctttacctgcggcttcgcatgcatcagctaaacctaaacgggtaagattaggtagcgataactgctcaccggtttcttctgcataggctttaagtaaatgagcaaaggtatttgcgcctacatcaccaaacttctctgcgtcgggtgctgcgccaattcctaggctatctgccattaagataagtgctcttgccatgggtacctcgttatcaatatgtggctactttatatgctcttcgaatttttggtacaggacataagtcctgtttcataaaacagaaacattataaatttgcatctctaagcgaagcaaaagagattaatcgtgtcttttttgctattgtgatctacctaacaatgtttccttctgtgtgggcgagaactttagtgacacgaacaattatagctattgctggcgcatctgcgtcgggcaagtctctttttagcaagacgatttataacgaattagtcaatgagcttgaaccgggcgcgatcgcagtgatcgaagaagatgcttattacaaagatcagtcgcatttgccgtttgaccatcgaacgcaaacaaattacgaccatcctgatgctttcgagcatgagcttttgcatgagcacttacttcagttgcgcgctggaaaatcagtagacgtaccaacttatgactatgcaatgcacacccgcagcgatgaatcgcgtcgagtggcacctgcaaaagtacttatcgttgaaggtattttgctactgagtgatccggcacttcgaaaagaatttgatattaaggtgttcattgatacaccgttagatatctgccttatgcgccgtatgcaacgagatatggagcagcgtggcagaacattacagtccgttgttgatcaatatcaagcgacagtgcgacctatgttttatcagtttattgagccatcaaagcacaaagctgatctcgtagtcacacgcggcggtatgaatcgcgttgccattgatataattaaaagtaaaataaaatatttactgcaacaataacaacgggaaatagtcagtatgacgacatttatgagcttagtaggcattgttgtgctactagccattgctttcgcggcttcaacgaaccgtaaagcaattaatttaagaacagtaggcatcgccttcttgctacaagtgctaattggtggctttgtcttgttcttcgaagtgggtaaaaacgtactggcaagtatgtctcgaggagtgtcatcagttattggttatgccaatgacgggattagcttcttgtttggctcactggcatcgcaagataccttagggtttatttttgcgatacaagtattgcccgttattgtgttcttctcagcactggttgctgtgttgtatcacatcggggtgatggattggataattaagattctaggcggcggcttacaaaagctattgaaaacctcgcgccctgaatcgctttctgcaaccgccaatattttcgttggccaaacagaagcaccattgattgttaaaccatttatcgccagcatgactaagtcagagctatttgcggtaatggtaggtggccttgctaccgtagctggttcagttatggcaggttacgtaacaattggtgtagagcttaaatacttaattgcagccagctttatggcagcacctggtggcttcttgatggcaaaaatgattgtgccagagacagaaacaccaaaagaagatttagcagatttagagatacaagaagaaaaaccggttaacgtaattgatgcagcagcatcaggtgccgcaaacggtatgcaactagcactaaatgtaggtgcgatgttacttgctttcgtagcacttattgcacttctaaatgggctattaggcggtattggtggttggtttgatcacccaacattaacgctacaagaaattttaggttacgtattcgctccagtggcatggttattaggtgtaccgtggaacgaagcagtaatcgcaggcagttttataggtcagaaggttgtagttaacgaatttgttgcttacctcgactttattaattatcgcgatacgttaagcgcgcacacacaagcgattgtcacattcgcgttatgtgggtttgctaacttatcatcgatagcaattttactaggtggattgggcggtatggcgcctggtcggcgaaaggatatcgcacgcttagggctcagagcagtgttagcaggatctatggctaacctcatgagtgcagcaattgcaggttttttcctctcgctagcttagaaacttaatgagatgagccgtagttgcaaaacaataggatagaactttaaggggttaaaggtctatctgacttgaacgatacttcaccaagggccgcaaggcccttttatcgtttttatgtgctaagatttatttactaagtctttttaagtatccgcatgaaccgttttcaactttttatactgatattttttctcagttggcctgccttcagtacaccaacacttacggttgtcactgagctttctccgccaaatcaaacgttaattaataatcaagtaacaggtgacagcaccgagttagtcaaagctatttttgctaaagcaaatttacaggcaaatattgagctctatccttgggcacgtgcttacaacatggcactaaagaaaccgaacacacttatttttagcatggctaaaactcccgaacgagaagctctatttcattggattggagaaatagcaacttatcaaatgggctttgttaaattaagctctcgcagcgatataaacatcacctcaaacgagcaggctaaacaatacaagattgccgtgcaacgacatgacctagcggctcaacgcttaactgagcgaggttatgtcgtggtatatacctcagacatcactaaatcatatcagttattaatggcgggcaaggtcgatttaattattgatgataaaaattatataagtgcaatggctgagcagctagcactagatgaggctcgctttagctttgcttacgctatcgactttttaactatgaaaggttatttagctgcgagcctaaatacgcagccaagctacattaaggcgcttaaacaagcgtttgttgaggtttcaaaaacaacccaataccaaaacgtgatgatgacaacaaactagctttactctattgggacaaaataatctgcaatatatttttcgagtaaaccgcgctgaatcaatcgatcataacttgcctgtagttttgataatacctcatcagggatatctttattaagagctaaaaagttaccttgtgttctctcaagcggtaactcaaccagtttgacaacctcttgcccataatggccgtattgcattaataaataccgaaatgacaactcagagccaacaattaattcaaccttgttttttaaaaacagatttatacattcatagtaatggcttacttttaataagttcttatctgctttaaaccctaagctctctaaaaagttttcgtaaatactctctctaacagtacatacgctgtattcttttacttgtgctaggtcacgcgggttgatgtgctcattagatttgaggcgataaaagaagttttttgatgacgcaagcgggcctatccaattaaatagtgcttctctgtcggtaatacgcgcagttgacactaaaccagacaatggctttttttgcgctaaatgataggctctaggccaaggcaatagctcaaattgacactcaatctctgcttccacacacattgccctaacaaactctaggttaataccctctaggtgacctttgttggaaaagttatagggtggaaattgctctgtataaatggtgatagtttgttttgccatcaaactcggagcaaagctaagacaagctaaaaacaaatactttatgataattcgtacatcctcattagatagccgaattaaatatagaaatattcatatcttcagtcaatttttaggcacaaaaaaagcaagccgtagcttgcttcttcttaatatttacttttcagcaaatattataacggagtgatgttatccgcttgtgggcctttttgaccttgtgaaagagtgaactctacacgttggccttcagctaaagttttgaaaccgtcgcttttgatagcgctgaagtgtgcaaacacgtctgggccattttcttgctcgatgaaaccaaaacctttagattcgttaaaccacttaactgtacctgatacgatgttagacatagtattattcctgatataaaaaaattaaacatgccctaatgggcgggtgtagcaaaaaatgagatggtacttaaaaacttcaggacggtactacaagtattacttatacaacaacgaaataaagatttattaattacacgctttctttctagctggtgcctactatatagagttacttgaataagtcaaacactatcgaaattaaaactcaaactctaaagccaagcgaaagctatggtcgcggcctgattgcgataattcgcttataaatcctgcttcccattttaattgacgcttcgcactaaaacgatgcaaaccaataaaaccagggcccacaccaaaaaagtcctcgccagcataaacttctattgatggctgaaatgcagagcgatagcgataacggtactgcaaacggaactcactttcccattcattttctatatcagccccccactcatacactaaaaatgcattcatagtcaggctagtacgaccaaactctttttcccataaaaagccagtcgtcgcttcgtatgcatctatagtgtgctgcttttcaagttcaaataatgccccccaatctgcccataaacgcccttgttctacaagttgccaacgtaactccacctcatatgaagataagccaaagtcaccgttatcatcgcgctcgccaactaaatacccttcaaggctcatggtgtcgttaattgcaccaccaaaacctgcgcgctgtgcaagcacattaccgttatcggtttgcctagacactaaacgccactcaacttcacgttcaaaaggtaacacgtaagggtgatatactttatcaacgaccatgccatctgcatggacaacgtgtgcaaagcaaattgcaaacagatagctaaaactgattattaagaaccgcatacaggctcctttttatgtttaacttttagagcgcgagccaaggcaataaatacggcgctcgcaattacatatacccaaagcgcggttttacttggcgtggcttcgtaaccgactaaggcttttagcacccggccaagttctgagttttcggctaaaaagttgcgccaatctagatagcttgaagtcacatcaattaaatcgacctgactcgctaaatcaagaaatattaataactttgctgttgcatttaaggcaagcaatacaatcaatggctgcatttttgctcgtctggcaacactttccagcaaaaagaacaataaaataccaaagctgacacaaattcctattcctagaaaagtgccaagcagtaaaggctcagcagcatctttattgtgccaaaaactgactaggtaaatcatgtaatggctcaaatatagggtcattgttgcaatgagagcagcagcggcggctacagtgttttgttgacaactgattaatgcagcaacaaaaatcatgatacatagcaacatttgaatgaactctaaaccacggtgttcaaacaactggctcatcgtcgccgcaccttgtacaaatagcaaactaataatggtgccaataacagcatatagacctaattgtcgctgattaagaggtactatcaacctgagtaacacggctaaaatcacaaccggtaaaagctgattaatgctcattaataaactagttatcagcattatcgacctccgtagccacaaccgttcctcgggccgtattaggcgaaaattcgccaaaaaagtcataacggccagggcttagtgggccgatataaatcacactggttcggccaggataaagcactttttcgcggtttaaatcaaagctatcgaactcttcaggagtgctatcttgattttcgatgagtaaacgtagctttttattggcaggtacttttatttcagcgggataaaacaaatgatcttttaagatcagtttgtattctttggcacaagcaagccaagatgacatacacaataacatagacagtgcagcaatccatttattcactgacgtctccttgcataaaggacacgctcactcgcaagccgccaaggtggctgtctgctaaagtaatatcagcgttataaatcgatactatatgttcaacaatggccataccaagcccagctccttgctcacccgatggatgtttatcaccacccacgcgataaaagcgattaaaaatgcgctgtttttgagcttcatcaataccgggtcccgagtcatctatttgccagacaaaacgattattttcggttttcagggtaatacaaatctctcccacagctggggtgtattttatggcgttactcagtaaattgccaaacaaagtaaccaaggtaaattcgtcaccagcaataataaaatcatcgccatcaatgctgatggtatgctctttttcgtctatacgatcataaagttgtgcaacaacttgctggctaatttctaacaccgacactgaactaaattgcgcctgccattgctctggataagtccgccctaaaattagcatctgctcaacgatattgctcaacttatcaacgcctttttccatcgcatcaagctcaacactatcgacaccttgggcaactaaattatgtacatttatttttaaactactcagcggcgtgcgcagttcatgggctgcatcagaggcaaaaaagcgctctcgtaaataggcactttcaacccgtttaaataggtcgtttaagcggctaattacgggttttatttcttgctctggggtttgccaagggatagccgtaaagtcatttgcctgacgatgtttaagttgattcgacaaccgagttagtggcgcaagcccttgttttacaaacacactaataaggagagcaaggataggcacactccataacagcggcgtcatggccgataaaattacagtttcggtgagcgccactcgcttactcaaaggctcagcgataagcactcgcttattaccttcgcttaagcgatacactttgactcgttgcccggccaagttctcaacgctaaacccggtttgccactgactttgatttatagcgttattctgcaatgactttgagcttgaggccaagctgtcatcaacccaaacttgaaataataactgcggtaaatcactcgtataagctggggtttcattactaagtggttgctcgattaacacatgcgccaacgttaccagctcgttatcgagcagcgcttcagcctgattcatgctttcacgataacctttagtaaaagccaaaaaacaggttaggatcaccatggataagataagtaatgtcagtcttttacgaattgacactagcgtttacccaccacataaccaataccacgcaaggttttaataaactcttttgggaattttttacgcaagtgatgaatgtgcacttcgatggtatttgaccccacctcttcgccccattcgtatagtttactttctaactgttgttttgattgcacgcgaccttggttttctagcaaggctttaaggagcataaactctttgcgcggcaagtttaccggctcatcttgaaatcttacggtaaatgcggcggtgtccatttcaacatcgccaacttttaaggtgctggtttgagcttgggtcaatcgccgactagcaacccgaagacgtgcaaataactctgcgggatcgaaaggttttgcaagataatcatcagcacctaaatctagccccatgactttatcatcaatactaccgcgagcggttaaaatcaccaccggcaggtttttacgatgctttttgatgtgctttagaatgtcgatgccatcaccgtctggtagtcctaaatcaaggactaccagctcaatttcatcattttgcagccattgcatcgctgacttaacggttgcactgtgttcaacactataaccttgttgacgtaaagaacgacacaggccttctgccactaagtggtcgtcttcaacgagcaataaatgcatagcttatctctttaattttttctctaccttagccaatagtttagtaatttcttgttggcggtaaaggtctgcctttggtctatcagggcgcgctggcgcttgctgagctactaataaaaattctttagctgactgatacttatgctcatcatataaaaatgacgcatataaataattactatcgattccataaggatttagctcaagggcttttttaaacagttttttggcttcatcatcatcaccaaagccaattggccaacctggcactttgccgtataaagttgccaaacttgtataagccgaaccattcagtgcttgtggatcaagcttaagcgctttttcaaattgtgctttggcatcttttgcaagacccagcgcacctaatccccctttcgcacctgcatagctcgataacacgataccgtaccaaatatggcttgccgcttgctgatcgttcgcttttgtaaactctgcggtttcattcgctaacttttcaaaggcatctagctgcgcatcgtcaactaattcgtaattaaccacagcccattgcttttgcaccgaacttaaatcgctattaaagtcggcttttgcaggcgcagccatgataacagctatcatcattagagctttaaaatttagtttagtcataatcattcaccttaatcaatttagttggcaaaaaaacttttaattttaggaagttgttttgctattgcgttatcaactaatgatggaaatgccccgttaatacgagcaaataatgtttctgggaagccgataaaacggcgacgttttttggatttaattaaatctattaatgcatcagccactttttcaggcgggtccatggtgttacccaactctttgttcatcgcacgtacttgcggcgaattaatcgcggtatcggtggcacgaggcgctaagtacaatactttcacatcactgtgactaagctctctggcaagggcttcggtcattcctctaaggccaaacttgctggcacagtacaaggtttgatatggatagccgatgctgccaaacgatgaacctatattcacaatcgtgcctttattacgggtaatttgtggtaaaaacagctgacacaatttaataggtacatttagattaatatttaacagatgatcaatttgctgctcgcttatttcactaaagccttgcatcacattaacgcccgcgttattgataagcagcgttgcgccgccaatttgctgggcaaacttagcaagatcattgcgagattcactgttacttaggtcggcttgaaaatactcagcgtcattgccgcactccaattgcaatgcagcaagttgctttatatttcggcctaccaataatacacgccaaccttcttttgcaagacgaagggcaatggcacggccaatgccccctgtcgcaccggttagcacacacactgggctactcatgcgctttgctccaagtcagcctcgctaaagaaaggttctgaatcgaggtcacggaaaatattgccgtacagtttataaaaacattttgcggcgtgaataatcgcttgctgatcgtcctcgttatctattttgttcatcagattttcgaaaaacttcacgtgctcaatatcaagagcaccatgcgaggtaaggtaggtaaacgcctttttaggtaaacctacaacctcacggatttgccccgctgcattatcggctaaggcaatcgaggtgccttcaagcacatgcaccatgccaaagaaggccaatgggttaccgcgattaattgtatcgtaggcatacgacaccattaattcagtcgaaaattgtggacgagaatgacgcactaactctttatcaaaaccacaggctgcaatatcgtttagcacccattcttggtggcctaactcttcttcgatgtattctgcaacagcttcgcgcagccactcttgtttatcgctcagctttgcgcctacagccattagcagtggcacggtgtgtttaacatggtgataagcttgcgttaagaacgatgcgtattcactcaggctgacttcacctttaaaaacgcggctaataattggcgcagctaaaaggtagtcacgctctttctgtgtttcggcttgtaatgtattgaaaaattgactcatgctcgtcgcctcttgataaagtgctgaaatctctgtagcaaaaaattgattaataacatcgcgtttggggcgattattgctggttaataaaccttgcgtgtggctcataggctctgccattcgatgccactttttgatctgtgcgtattcgggtaattgcgcgttttgtgccgtaatatgagcagcaagttcatcgtcactcatcgcttggtttgcatagataagcgcagctaaaaatgcttggccttcgccaatcaccaccgcttgttgtacctggctgtggctaagcaataacgactctggccactcggcactgatattgcgcccaaagctggtgatcagcttatttttcaagcgaccttgaataaccaagcggcctgcttgctcagtgacgagatcgccagttgcataccaatcgtcggcactttgcgctgcttgacctaagtaccctaaaaacaatgagcctttgatataaagctgaccattttcaattttgtattggatatgtttgagaactcgccctgcggtgtcgatgccatcatcatcgcgcgtgtttaggctcaccaccgatgaagactcagacaaaccatagccttgataaaccggtaaaccgaactctcgggcttgcttaataagtgcttggcttacaaccgcgccacccactgcaataaactttaagcttttaggtgcttgccagccttgctttgcaaaagccactaaacaagtcagcaactcaggcactaaaataagggtatttggctcagtgcgttcaatggctgctattaatttatgtgactcaagtagctgtgcgccagaaaacccaagttcagctaaaggcactaagttaactgtgccacctgctaatagcggcgcatacacacccgctaaattctcaagtaaaaccggtagcggcagtaaacataaatggtttggtttttctaaaccaatgctttgataaagtgatgtcgctacctgcatctggctctcaagcgataaacacacaccttttggtgtacccgttgagcccgacgtaaaggtaatcttttgcgtgtttgcaaaataaggaactggctgtgtattacttaattgataaacatataaagggtaatgcttacatacatcgactaacgccactaaccttgcatgctcaccttcgtaagcgcggtcacatacaaatagcccagccccactgctttgcaaaccaaacgctatttgctgagccgtaaaaaatgttggtagcggaattgccacttttttaagttcgctaagcgcagcttctaatacacaccaagcaggtgtgttatctaattgataggcgacaccctcagcattaaactcaaccaaggtagctaacagacgagttacttgttcagtaaaatcttgtttagtcagtgagcgcacaccttcactttgatgacaaaccattaaggtatcgctatctttgtgtggtaactgtgttaaccagctcatagcgcctccaaataaacagccaattcaagggatgactgtaagcactgctgtttaatattgaataaaacaggggtgtttaatacacgttgatgtgcttcgtttaggtcaaccacacaaatggttggttggttgtcgtaatagctaccccagcttgctggatcttggagtgcttgtgcatttgcaacaccaatttctttgcaattaacacctagcatttttaatagcgctctgactttacgggttgcacaaaacactaaatattttgctcccgcttggtagagtgcttcgttcattaaaacaaaatgtgccaaggtggcttttcgatgcgttgagcataaattacctaactcaaaaatgtgctcacgcttggcaccgacaaagtgctcaatagacacagggaggtattgttcaataaacaaaggttgtgatgcagagcgaagacctaacgtacatacttcatcatcaacattcagctcacaaagaagcggcatgaactgcgaaattttcgcatcataagctgcagcaaaaccttgcttaatattactctcaagacggtcgcggaactgacctccttcacgcgtgcaaataaaggcaggctcttgaaattgagtttgatgtgattgttgaactgaaagcataattgttcgctccacttaggttatgtgtaaaatttatcgagcgaaacttaaataaaacttaagaaaaattaatttttataaatatttttcaacctcatgatatttaaagcttttatttttattaaaaacaaaaatgccagtctgttagactggcattttaatgcttaaattaacgttaaacttagattacttaacgatagtcatctctttaagtagattttgagcattatcaactttatccatcacccacaacatgtatcgtgaatcaacgtgaattgagcgatttaaattttcatcgtaatcccaatcaccaataatactttcgtaaacaccatcaaataacaaaccaactagctcagcattaccatttaatgttggtgaacctgagttaccacctgtggtatctacatttgataaaaagttaaccggaaccgtattcataccgcctgtgtaatcgccataaagcttttgcttaattaactcattttgcttttctggtgagttgaatggttcaacaccggtattttttgcaagcaagccttctaaagatgtaaagggggttgccactaagccatcttgcggtgaatagccgcctaccgtgccgtaagttacacgcaaggtgctgtttgcatcagcataaacaggcttattaagtgccttgttataagcgataattgcttccattaatgcagggcgagcagcttgctgtttaccagccagctcttttttcgcatcttcaatgtctttagtaacggcaaaaacagcttgagcgtattgaatgaatggatcgctactttgctttaactgagcaaggtcaagttctgtcatccataaacgtttgctttcatctgcaagaaccgatttagcatacatatcatcaagtaacgcttgttgtttttgtttatcaaaaccattggttaaaccaagcgctttatctacctctgcaactcgctcatcgtttggcaaagctgcatattgctcaataaagtacaataaaatggctttatcaacggtttcatcataacgacgactcatgctttctaggcgtgatttaatgcgcggcatatcacgctcttgataaccgctttcgcgctcagcatctggcttttgtttttcataagctaaacgatagagcatacgagccgatgacatcatttgtgagcggtgtacgtaacctaacatacggtcccgttggttgtgctcttgagactcagcaactaacgccgttaaatcagcaagtacatgtccgtatttagctttgcgcttactatcttcattgatccacgcagtgagatctttttcgaattgctgcttacggctatacattgaacctttgttaaagctctcaatcattgagccatagtttttaatgtagttgttgtaacccgcaatcgtgctttcataagcaatacgtgcctctgaaccatcaggggcattttcttcaatcaacgagacatatttagaattatatttacgcgctaatgggtaggctgtgttaaacacgtaatcaacttcaggcgaaatacggtaacggtttgtgctgcccggataaccggtaaccatcacaaaatcgccttcttgtacgcctttagcgcttacttttaaaaacgcatcactctggtacggtacgttatcttctgaatattcagcaggcttgccatctttgccaacatacgcgcgatagaacgagaaatcaccggtgtggcgcggccacatccagttgtcgatatcgccgccgtatttacctacgcccatcgctggtgcatacgctaaacgtacatctttaatttcaagcgctttaattaagtaatattcaagaccaccatggaaggtatacacattacagcggtagctttggtcttgctcacactcactaacaagtgctttttcatttgcttcaatggcatcaaagcgtgctttacctgttagctgttcagtaccttggtttactttatcggtaacttctgtcacttgctctgtcacataaacacgagaacccggcgctgcaggcacttcttcgcccgttgttttagctaaaaagccattttctaaaatgttattttcggtggttgagttatattgaatcgaaccataggcacagtgatggtttgttacaactaagccttttggtgaaacaaacgaagcggtacagccaccaaggctaattaccgcattcatcggaaactcagtcagttttgaaattgactctacatcaatgctcaagcctttcgtttttaggatagattcaagttctggtagctggtgaggttgccacatgccttcgtcggcaacagcaacatttgctacagcgagacccactgcagcagcaataaatttaaaacgcatagtcgtcctttatatttgttatgtttatctttttagcgctcttatcattatcattgtgctagccaatagcaataatttgcgaccgctaatgtcaaagtttgtaaaccaaataaggctgtatggcctaatacttagactcataaaccacagcattgtggccgtgtaagctttcttgatgctccactttaaattggtaatcagtaatacctggcatggtttcgaagcactgctttagccgccttgctgcatcttcgcaaaataataagttttttgcgttaagggcggcaaatgcttgttcatcttcacgcttaacggcggtttgcactggggtccctatggcttgctcacagactgtgataaagccactaatatccggaagcttttcgctactaaaagtgacatcgatatacgcatatgagcgctggctatgaggggttgcaatagagccctgttcacttgtgagccaattgattaaagatgctttatcaatagcggcatcgctaaactgtttatcgaccgcttcgctcaaaagctgcctcgataatgccgctgaacatgggcacgtgctgctataggcaatatcgacttttaagttaatggtaagtgattgctgcttcgtgatggttaaaactacagggtaagcattgtaaccgcaatggtcgctcaggagcgctggttttagctctggtaaatcaaaatgcagcaccagttttacgcttttacttaagtctttttgtgatgctaaaacggcattcataaactcactaacacgctgactagttaagctttgttttgccaatagctgattaagtagtaaatagagacgcgacatatgaatgccttttgcatcgctatcaaggctgacaaaaatatctgctttggcattaaggtgcgcatcaacattaggttgtgcaagtttacaaggtaatgcgataccttccatgccaacccattttaaaggtgattgaaaatctgtattagagtgcgaggttatatcgggtaattgcatatcaacttcttgtattatttatatatattgctaaagcatcaattctgatgaactgaataagtgctatcgcaccaaagaaaatgatacaatataacatcataaaaatttatcaagagctaatttttgggcctttcacaccatcattgtcatgcagctataaacgtaaggacgaacttgcattatgggtattaattttaaaaagtatctaataacaatttagcttgagaagtcgaaaaagatacgctgacatttacgaaaattaaccacttatcgcagccaataatcaccttatcgcaacgaatgagattattgctatcgatacacagtatgctctatatattaaccgcaaagttatatcagcctcactcatgcacacattcgtgccatctttgtgtaatctcatactaacaaccaacactatgattacataaagtgctgacataacgttatatcggtacaattactttaaaaaatgacaagagaaacactatgaaacacctagtcgcaaccgcgatcagctcagcgttattactaacggcctgttctgagcctcaaactacagctgatacgcgtaaaactgaacaaacagcagaagtaaccgcagctgaacaagcaaacccactatttgttaaaagtgcactgcaatacgaggcgcctgattttagccttattaaagatgaacactttatgccagctttcaataaaggcatggcagagcaaatggctgaagtacaagctatcatcgacaaccctgcaaagcctgattttgccaatactgttgttgctcttgaaaaaagtggtgagctgttaacccgtactcgtagcattttttataacttagcaggcagtgactcaaaccctgctcgccgtgaaatccaaaaagaattagcacctaagttagcatcacataacgataatatttttcttaataaagcactttttgaaaaagtagcagcggtttataacgatgcagacaaactagcattaacagccgaagaaaaacgtttacttgatgtttactacaagcgttttgttcgcgctggtgcacaattaaatgccgaacaaaaacagcaaattcgtgatatcaatactaagcattcaagtttaacgacgcagttttcgcaaaacttattagcactgacaaaaacaaatgttgttattgttgatgacaaagctgagcttgaaggcttacctgcgggtcaaattgaacagcttgctaatgcagcaacggaagctggtcatgacggcaagtacttaattaagatcaccaatacaactcgccagcctatattagcaacccttaaaaaccgtgagttgcgtgaaaaagtatggcgtgcatcggctgagcgtgcgctatcaggtgaaaataataaccgcgatatcgtggcagaacttgctcacttacgcgctcaaaaagctaaattattaggctacgacagctgggctgattttggtttagagtcacaaatggcgaaaaaacctcaagcagtatttgatatgtttgcgagcatgatccctgcattaatgcaaaacgttaatgctgaagcagcggctattcaagctaagatcgatgagtctggtgaacaatttaagctacagccatgggattggttattctacgcagagcaagttcgcaaagataaatacaacctagacgaaaatgcagtaaaagagtatttcgaatttaatcgtgttcttgaagacggtgtgttttatacaatgaaccgtttatatgggattacttttaaaccacgtagcgacttaccagtttaccaccctgatgtgaaagcatatgaattatttgacgaaaatggtaaaagcctagctattttctatgccgattactttgctcgtgaaggtaaacgtggtggcgcttggatgagctcatttgtgaagcagtctggtctaaaaaatcaaaagcctgtagttgtgaatgtaatgaacattcaaaaaggcgcgaatggtgaacctacgcttatcagctacgatgaagcaacaacgattttccacgagctaggtcatggtttacacggtatgttctcaaaagttaaataccctacactttcaggtacttcggtatcacgtgacttcgttgagtttccttctacctttgaagaagactgggcaatgtaccctgaagttatcgcaaactatgcgaaacatcataaaacaggtgagccaattccagatgagctacttgaaaaagtcattcaatctcgtagctttaaccaaggttttgataccttagagtatgttgctgctgcactacttgatatggaatggcattcactttctgctgatgcgccactacaagacattgaaaagtttgaagagcaagctcttactaagcacggtgttaacgtaccatttgtaccaccacgttataaatctgcgttcttctcacactcaatgggcggcggttactcagctggttactatgcttatatgtggagtgaaatcctagcggcagacgcgtttgcttatgttcaagagcaaggtggtttaactcgcgaaatgggtgaaaaataccgcaaagaaattttagaagtaggtaactctcgtgatctgatggaatcgtttaaagcattccgtggtcaagagcctgatacgtctgcgttgttaaaacgccgcggcttaaaagcaacggttcaatagctttaagctctaagccgaattgtggggttatcgagtattgataaccccacaacattcaacctctttactcttcacgtaggttgggtcgagcgaagcgatacccaatgtaaagaaccttccagctatcagtcgtcagacgcgcgaaacaagtttcacgcctacaaaaaggggctaggttctaggacgcgatgtaaaatctgctaccttgtatctcgtatctctaaactcgaaactcgctaactttactctcgctaacttaaaaacaaaaaagcccttacagcgagctgtaagggctttgttatcactatttaaaagtattatttacgtttacggcgacggccgataagcgctaatggtgcaagtagaagcgttaagaaaccaaagctaccattgctagatttagttacttttttctcttctactggctcagcttcgttagttacagcaacagtgaactgctctgaaacagaatctgtcccatcgctcactgttacttcaaatactaactcgtcatcgcttgagatagcacctggcttgaagcctaaagtagccgtatcagcacctgtaagcgttgctgtagtaccgctcacttgagtccatgtgtagcttagtgtgtcgttgttacggtctgttgctgtaacagacacagtacctgaagccgattcagaaaccgtttcatcaccagaaacactaataataggaagtgcgttatcacatgctaacgtatcaccagcaattacgttcgagaagattggtgacgtaacattgcttacagtcacgttatcaatccaccagccgaactcacgtactgcgctgtctgatgagatacggaagcgtaattttgcacggttaccgtttagttcagtaccaaaacgaatagtttcgtagttaccataaacaccattatcaatattgttacctgtgaaggtatcgcgatcttgtagtgcttgtgcgtcattttcgattagtgggccgtcgtaaccaacatcaaatgaaccgcccatttcagtaacatcaacccagttaccaccattcacgctgatttctacaacaccaccatcccactcgttttcgattaggtagaagtgccagaatgaaacttcaaattcacctgcaaagccaatatcgaactctcttgactcaatagcaacatctgactggaagtcattgttgttcaagtacattgtttgctcgccaagaccaaaaccaaagctgttgaagaagttaacattaccgccagttgccatgctttgcgtgccaacagctaagtcatcacctgtcattacgtgctctttccagtcgcgtaatgatgtacctgctacttccatatcatcagcagtttgtgaactaacaggtgccttgtcttcaaagtccatgtttacaaggtaagatactgtatcgcttagagcttcaacgatttcatcatcagcagaaagctcagggaatgacacttcgatttcaagcgtatcagcagtgccagcatcgtttaatgtgaacttaattggcgcacttgtttgcgaagcatacggtgttgtatcgtcaaatgtgattaagccatcattttcaaatgtaacatcgtggccactcacaacagttaattgtgcttgtgtacctgttagtacttcactacctgtattcatgatgctaacagttaaagtacctgtttcacccttatcaagaatgttgtcgtttgaacaataaccaagctcaacaccattgtagcttgcattcatttcaacatcttttagggtaaagcttgcaagttgcattttgtcagattcaacaacacctgttaaatcttcactgaaacgatctggcgcttgagcacctaagcccataccacgcttagcaaatgcacctaagattagtttgtaatcttcagggtcaactgcatatgcagccgctaagattgcatcacgtgcttctgtgtataatggtgcaactggtgttaacttgtaaccggcaactaggtagttagccatacggttttgagcatcttcaaagccgtgcttgttgataagcgctacgtagctttcccaaagcatggttgcccaaatttcacctgcagcgtgtggtgaagcaacactcgttggtgcaatacctacatcatcaccagcatcttcagtaatgtgacggaaagacagtgggttaacgtccatatttgttgaatatggaacacgacggataccataatagaagtcttctacgaaagtaccgctaccgtatgctttttggaacttgtcgttacctgggatgttgatgtcatctgctttcgcaatgaacattagtgagtggaaatcaccccaaccttcgcccatcgcgcggccttggaagttgataagacccgatgagttacccactaaacggttactgatatagtgaccccattcgtgagcaataataccgttatctaacgtaccgtcttttaacgtagctttattgaacatgttaacagtaacagtttcgcctgcatcgataccatcgtaaagtgcatgaccgtcagcaaagttaagacccatgttaggaataagcactgcatcatcttcaccgcccattggcgctggctcatcagtatcagggttgttattcacaacaattgcaccaattgcacccgcttcttgagcgtgtagtacttttgcagtgaagttacaagaaccacggtctactagcgcaattttaccagctagttctgctgcgtttgttgcaggttcacaaccatcagttacgctaccagaatcaacgttattatcgtcaactagacgaacaacttcgccagcgatatcagcaaattgcatttgaccaaagctagatacttttgacgaatctagaagaccaatagtcgcgtcagatgttacaaccacaccatagtcaatgcctacttttgcatctttactattgtataaatacatttgcatgcgagggcttgcaccatctgcaggcgtagacatgtttgcgttgtttaaaccgctattatcttgtgcttgcgcttcgattgggtcgccttcaacaccaccacggccgtagttcgatacttgcgcaacatttgatgtttcgtcaaaaccatggtcgtagaagaaatcgtgtaagaagttgttcatgtagaacaagttaacgattgccgctttacggttatcgtagctgtttgctacttggtcaacttgataagggtaatcgaatgtgaagtctgatgtagtttcagcagtgaagtcaccttcagtgtaaccttgaggtgcgattacatcggcataagcaaatacgttgttacctgaagtggttgtagcatcatcagcaagccacggatccatcgtgcttagttttttatagtaagacaaacttacaagtggtgcatctaggatttcagtttcatcgatttgatctggaccatcagctgggatcacgtcgccatgaggaccttcccacggataaccatcttcgtcagcccatacacggtagttaaagtctgccgcgtgtgcttttaagtctttcttgaaataaactttgctgttttgtgcgccaataacgtagctgaagtaatcgctttctaggctgtttttatcagcaacttctacttcaacgtagtatgcagattgcaactcgcctgctacttcaaagaatactttcttagcacgtggctggcctagtacaattttgtcaccagtttggttagacacattgtacttaacatagtcgccttgttcagttgatttagttagcgatacgtcgatatcagcaagttctttaatcgcacgtttaatgctttgctccgcaccaacaaattcagcaagtggtgcgaacgatttggttgcactagcgcttgtgtttgcaaagtagccagaacctgcaactaggttatattctttgtccatgatcaggttgtattcacggttgaatacttcaatgtcatgtactttttgcttgtatttagctgtgattgaaccaagcttctgctcagataaatcagttagtacggcgctcgatacaccttttttcaaagcgctaacgcccgttaaagcatttagataaaaatcagcagcgtatgcattgcgctgctcaggaaggatcatcgccatgtctggcttagcttgacctaccgcattccaaaggaacgtagctttacctaattgctcatcgaaaattgatttgtgccctgatacagtacgacgctcagctaatgcacgttgctgagatacttgaggattaaactgtacttgagaactaacacttgatgcgttgtaaaagcgagtttgttcacttgcttgtatttgagttgatgccaagatagccgttaccatagttgcaacagcagttactttaaattgagacattccttacgttccctattgttatatttttattttcggttaacaatcataaccaaagccaatgtacctaatctggcaatcaaaagacagaatcaattgtaaacaaaagtaacgaacaaacaggtcaacaatgaacaaagcaattaatatacagttagttacactagcgctaatactcttatcaggctgtcaaaaaagtgaaatatccgaacaagatagctcgcaacactcagcaagcagttcacaaaaagaacaagttttagataaagatgttaaaaaagtggtcgagattaacaaacaaaaaccaattaacgcttttagcaataatggcgaaaaaattacctttgccgcgcctactttaaccaaaggcactgaagtatttaatcatgcgatgaaagagcctggtattgctaccggcgctatctatttaactctcaaagataatagcttaccggtagagcttagcagccaatacacgttaaaaaaaatgaccaacaaaacatatcgataccttgctgaaaaagatactgatttattaaaagtgcaagacgtttttaaacaaaatgccaatgttgatattgttgaaattaaagttgattattcaccgataaaagaggtgatgtagtaaagaagctgtcagccttcagctatcagccgtcagacgcgcgaaacaagtttcacgcctacttgtagcagcgggtttatcccgcgtcatcatgcgcttggttctagaaggagctgtcagccttcagctatcagccgtcagatgcgcgaaacaagtttcacgcctacttgccgcagcgggtttatcccgcgtcatcatgcgctaggttctagaagaagctctcagccttcagctatcagccgtcagacgcgtgaaacaagtttcacgcctacatcaaaccgtaggcgtcatgcttgcatggcgtgtctaacattcaacgccatttaatcaagctaactcaacattcaaaaacaacacttttcggcttaaaacttacagctgaaagcttaaagctgttttacctactccaccacaaaatcaaaataggtagcggggtatgcttgaggttgataggtaaagtgccaccactccattgaataaggggcgaaaccggcatcagtcatgagggtttttagtttatatcgattggctttttgttctgcgcttatccgcgggtcgtcggtgtttgacagggtgtcgaacatatcaaagggtgagcccatatcgagctctttgccttttgcatcgactaaggttagatcaattgttgagccacggctgtggcccgatttagcggcgatataatcacctagtagcttgtctttgcctagatttggataaaactcagctttagtgcgggtatcctctaaatcgttaacccaacgcacaaagtgatcgactgctcgttgtggtcgatagcaatcaaatatctttaagctaagcccttcattttgagcggcattttgtacttttttaagggctgtagcagcactattatgtaataaacatttaggtgcattgtagccatctataggtttgccaacaaaattatgatgaccaaaataacgaatatccaacactgcattcggtatcaatacgcctacatcaataaactcgctgcgcttgtcgtcatccgagtttgcgtaaacattattaccccatgtcagagcaacgcttgcaaacataattggttttattaatcgagcgagtaaagtaaatgccatatcgatttgtccgtaaataacttaataacattcactattgcatataaaataacttattccaacactggagtgtcagaaataggggttagctctttatagtagctgccatcaacaacacagcgattgcgcccggtctttttagctttatacaaagcttgatcagccaatttaaacacctcttcgaggctcatttgttccagaggccagcccgaaataccaattgatacattaatgcagcccactggatctatgaagctttctgagacgcgcatacgcaagcgctcagcgagttgataagcccgttttgcctcaacttttggcatgatcacaatgaactcttcacctcctgtacgtgcaacaacatcgccatcgcgcgtgacatccagcaagattttagcaagtgattgcaatactacatcgccaatatcatgcccatattcgtcatttacccgtttaaaatgatcgatatcgattgccagtatcgcaaatggacaacgctgctctataaagtgacttaactgcatatcgagactacggcggttatgtaaacaggttaatggatccgtttgtgcttcttgacgtaacaagccaattttactgtgtaataagccaacacctctaagcatggcttttcttagctcattgctttcaaagtaccatgaacgaatttgtgtcagctcaagcgaagtagatggtcgatcgagagtattggcggtttcagctaattgtctcaaaggttgcgcaattaaacgcgcaagcacccaaataaatacaaaagtgagtaaaccaataggtgccgtttttacaaatacttgccacattaagctgtcgagcggtgcaagggtactgtctagtggacgctgggttactactccccaaggagctactgtcatcggtgcgtagccagcaagcattgcaacgcctttgctattggtaacaagctgagtccctgagttcccttttagtacttcttcaattacttggttatcaaatacttgctcaccaatacggtatttatcggggtggtaaagtaaacgatggttttcatcaaccacatataaataagagccgtcttgatagaaatgaacttgcaataactgatttaagatactggcgcgctttaagtataaagttccgccaacataaccaataaaattgctgtttttatcgaatagaggttgcgagataaaaatgagtaaattacccgccatagaaatgtaaggctcgctgatcataggaatacggtatgacaaagcagccttggtgccaaaactatctactttacgattttgaagttcaagagactgcggcgatacgccaagaatttcgccttgtttattaacgattataatcgagttaaaactattagtttgtaatcttaagcgctctgcttcagcactgatcagcttctgattattaaagtcttcttcaaggattttgcctacataagcaagctgttgctgagcagctaacaaaaagttatcagtagccgaaaccaacttagcagcataggctttgtgattactcattgttttatctattagttgttgtttttgaacttggtagctcgagtaataactatttaaaaaggtaataagcgttgcagaaaacgctaataataaaattaaacgacgtaggtttaagcgtttgctaagactattaagcacgatacttctcacataagggccccaaattccatatcgggtacatctaatacctttatactagcaatttgttctgtgtacctctataaaacttttatcagaatttgatttagcgcaaacaaataagtgtaattactctaatttcaagttactgctttttacaaaggaaacacccttaatttaagtgaaaacatctgtaaatagatggttcaaccaagtaatggcaattcatttcttgtaatgttttttcaatcaaatactaagctaagcgtttaaagctttacgggtcagtaattgaacaaaaagtaacttgctttgaaataataatttattacaatgttaagacaaaataaaaataaagttttcttatgcgccaacattgttccgatattataaagtcactccccacacaccgccttatggcattagacgtaatgcgggggctaactatcaccgctatgatcttagtaaataatccggggagttggggagcgatgtattggccattgaagcatgcacaatggcatggttggacaccgactgatttaatttttccgttttttatttttattgtcggcatgtctatcacgctatcagtaaataacttgcgcgctaaaggagtgagtgatcagcaaatagtaaaagcaggtgttattcgcacccttaagcttattgctcttggttggtttttagccctgttttattacaactttcgagatccctctttcagctgggttgatgacaaactattgcaactgcgagttttaggcgttctgcaacgtattggtttagtgtatttagtcgctctgtgttgttatctctatttatcgcctaagaaaatagccattacttgcatcactcttttattattttatggcgccgccatgctttatatcccttataccttgccaaacggcgaggtagtgagtggcttatggttatatagcaacaacttaagtgcctttattgatagtacggttttaggtagtcaccatgtgtattatgcgaatgctaagccactgccatttgatcctgaggggcttttttctacacttccagccattgccagtgcgctaagtggcatcttagctgcggtttacttaacaaaacaacccgacctaaaaaaacaagcccgtacacttatcttattgggcacattagctgttattgccggctatgctatttcgccattaacgcctatcaataaagcattatggacaccaagctatgtattgctcagctctgggcttgctattattacgtatgccctgtgcagtgccattttagatatttataaagtacgaagctggggcgcaccctttattgtatttggcgccaatgcgatactcttttttatgtttgcaggcgtatttgcacgcctattaataatgattccaataggcgatagcagtttaaaaggcagtatttacggcttaatacaagtgtttataagcaacgattatttagcatcatttgtattttcgctgctgtttttagccgtatcttacctggtgatgctcacgtgttatagaaaaggcattttttggaaagtgtaggttttaaaatagatgagccagtcagtaagctaaatatggcttagacactaaagaacaccctataaaaggaacttaaattcaataaaaacagttaattagatttaattttttaagttaacattttttaaaatccctccaaaaaaggataaataatcaaatgaggtacgtaaaatgaattctcctatcaaccctaattacactcacttcacaaagtgcgatagcaaaaaatactgatggctatcaaaatacaaacagattaaccaattcgcttggcgccaatctgcaaatgcaattagccttggagatgaagcgcgtcttaaacagctagtgcaatcgaaccctgaagtaatgacttatttctcaaaagtcgataatttaactcttataaatttcatcttaaaccaatcacaattcactatcgacaaaagaaaatcattactggaagttatgaaaaatgaggggactgctttttttaattcaaacatagctaacggaatgaccccgcttcaaagacttctagatacttacaatgcagactacgaaacagctgcaatggctgacttattgcttgagatttcacccaaatctgtaaatcttaaagtgaagacggcttaacccctctttttggccatgtaagtaaaaaaacagcaaaagtactcgttgatggggggcagacataaatgcagtatcaccaacaggctggacacctctcatgcggaatgttcaacaagctagagaagacgttgtagacctacttataaagcatggtgctaaaataaatagcaaagataatgaaggtaattcaatcttacacgttgcggctgatataagcatatacagtgatgattcgtttgaaaatggaactcgacgcgcaagaataatcaaaacactactcgagcatggcgcagatgctacggttgttgataacagcggttcaaccgttttacaccacttagctaaaaacatagacgttatgcctgaggaaattttttataatagttatcctggcgaagattaaggtggtaaccaattcattgtttactttaaagctgttgcaaatgaagtgttccaaaaaggcgcggatttaaacatcaagaacaataacggcgaaactgcaactgacgtagcatccaatcataaaagtgatatggccgaagcgttgaaggccgttgctaaaggctaagacttatccactaaaaagggcaataagttcttcttactgccttttaagccaaaccaccagcgtctcaaaccttcaaaacaagcccatcaaacacgtttcgcatcacttatcgcatctgaaatcacagcgtcacacttttcttgcagcgcttgaaaaaacaaatccagtctttcacccttagcggagcgagtatattctttcggggaataggcgcttttttgagagtcgatcgttagccccatagaggtctctgagtcatacagaaaaaacccacacaagttaaccagctcttttgctaacctttcattattaattaaaactctcgcgttatctctaatcgagtaaagaagcgtttgatgctcatcacaaacttcacgtgcaatgaattttaaaaacaacttcccaccctcgttttgattacacaaatcttttaactcatataactttaaacaaaactcataattgagctgcagcttagcaaacttaatagcttcctttgatgtttcatgagatttaaccgctaccctataagttacaaaggcaataatcgctgtaataatgacaaccaccaaatttaaaacttccgcgacactcagcgccatataaatcttcctgaaaattggtgtataaattaaaaaaacaaaaacgagcacatcccatacagggagcttttcttctattgcatcaaatacgctaaacaaaacacatccctgaacaaccggatagataaaccagcacaagaaaccacttcaagtgctaataagtagctaccttttctctattcgatggccatcaaaactaatatcaaccaacaaccttaccccaggggtaatataaaccccctcagactcataagaaccaagcgttacatacagcttaacttcacaagcatgctttaattgatgcactgtcccagtgagctgctcttctctgccgcagtaatgcgcgacaaaagatttattgccggcattttcctttgtataaatcaaaacattggatgagggactaaaagtaaaccaccccaagaaaaggcctgttaaaaacagtgttcccgctaaaaaatactttttcataaaccaccgtaataaccattgtaattaagtcagagcgcttaactgacacagacctcaataatgcgatcaagtagtaaattcagcttactgaaatcataattctcatccagcgacttcactttcttaaactgctttaagtagtatcctttcttttctagcgcgccctgatacacattggcatcccctttataagaagaccacctaataacaggctccaacctttccttgaaagacaaatctaggaaacactctatggccaccgctttaccatttacatcagcattatgcctacccgttggcccttccgtgacaaaatcagaaaactcggccaagtcaggcaacttcatcactttaagattgctaggcgctttaatatctaccgccttatgatacttctctacaccttcagcatcgttatcgaagatacaaagacatttgttttgcataccaatactcgccaaaccttgaaagaacttatactggttgccggtaccagaaaacggataattgtcttccatatcaacataagtaaataagtcagccaactcaggcctaagaagtgaaatagcgtgctttataataactaaatcagatgacccttcagtgattatcaaaaacttatctttttcatcgacaccggtataaaggtcatcatcactcacccacccggcctcaactatctcgtgcgtttgccacatcacttttacatgctggttcttagggttttcagcaagcaatcgcattataaaatacgggtgaagacggtcaaagagcgctgaaaagtcatcatcatgtgtcgttactaggtcttttatatcttcaaacccactttgcgttaaaacagcctcagcgatatagtcatgaaacgataaatgaaaactatccttaaagggatcaaggtcttcaatattcaccgatgaaacgactttcctaaaggtatcaaacgcaaatccatccaaagacgtatcgtcaaagtagtgataaaagacattttcatacgccctttgggcatcgtttattgtgtaacccagcagctccaaacgcagcttcatgtcacccaagctgcgcgagtgacccgtttcctctcgcagaaccccctcatccatttcagatttgataacgccataatcagagggaataaacagtttagagtgattgttatagtactcaccattactacactcgagctcaaaagagccaacacctaacgaagaaacagaacccacaaacaactccttataagcacgctcaagtgctcctttaagcgatggcgataaccctatgctttccgccaaaaccaaactaaaaacttaatttcaaatattcggccattcctaatagttaaaaaacaaacaacactaaatcaaagcgcctaaagccctacttcagcatgtagagctctttctcaaaatcgttcaacccacctaaattaataactttaagaatacagctagataagatggatgacgttttttcaagaacatccagtgaaggaaccttactaccaacatcccttaccttcacaacatctttaaccttggcattgtgaacagcagacgagcgaatactataaaaggcttttaagtagttataattcttttcgcgctctttataatcatcggaagacagcttggcaccaagaaggcggacttgtaaggaaagctgatcagaactttcactctgcgtgagaatagattctgcacacattcctaaatcaaccgctttatcaactacgtctagtgaattcatggacgttgttttgcgtttaagggcgagttcaacagcgcctttagtgtttgcatttaacgcgcagtaatgcccgaacacctttctcaatgtgtctttttcatcaaaatacacatcttcattgtaaaaaggacgcagctcctgcagtgcgctaataacattcacatctataaaccctgagcatggcactgtatcgtcaaaaagcattctgttacgtgtgataaccgcgccatattcttttgtgaagagcgacaagaaatttgccttttctgtatgcgagtccaatatatcgtgaagcgctctaccctcatcgcgaaccacgtcgacgtcttcgtgctcatttaacacattttgtttaactgtggtgacgataaatgccggcctatccccagggaagtccctgacaatgtcagcccaatcagcatttatccggtatttaacaccaacggggagtgcatcaaacccacatatatacgtgtcattatcaaaataatatgtgtgcccaggatagacgccttccaccagcgatatgaggtgcaatggtaccgtgtggttattcgtaaaatctaaaaagtattggaacgcttgctctgcaccaacaccatttgctttggtgcaaagccacttggccacatcaaacggggatattgccgtgcggcttgatgatgacccccacgaccgattaagaaactcagaatagcgcgctgctaacgtatccatcaatttaagcggcttctttgccacgccataactaacaaccatactgcgccactctacaagtgggctcaccattttcaaaaacttttcgtctttgcgacactcatcaataagtttaacgatgtccttttgatacgcttccatactttgtccattacaatttcaattaacgtgtgctctttccggcttacaaacagacctacacccgctctttgactattaaaaaattagtcaccccaaaagcaggggcagacatgcagcagctgacaacccttatgaatacagcagcttttctttttgctcatcatccccacccagctcgatgactttaaataaacatgctgacagtatttctgatgttttcattatgtctctacgttacctaagaacttaacagtatagctatttttttacatcaccgctgaggagcagataccctaaaacgcttttaagtaagataatacttagcgcgtataaccggaacatctattgccgacttagggccccctcacctgcagcgccagctgctctgaatggtcttttggggtcaacacagattcggtataaatacctaaatcaatatttgctaattttactggatgggaaaacaaacccgcattttataactttatcaaagtacttgatgatgcttacatggctgaataaaagaactacgttttaagctacatcccaaactgcttagagatgacatgttaagtatcggtgcacacgctaacgctatagataacgatagctacaccgcttaataggtgtagtaatctataaaaatgaaagaacaaaaactatttttagatgctggcgctaactcgatgttaactaaaaatcaagatgccaacagaacggcccttaataacgctcttactggataatctcgctgtgcgaacgcaatattattttttatgtttgcacggctattaattatgatcccgctcggcgatagcagtttaaaaggcaatatttatggcctaatacaattagtgatcagcaacgattatttagcatcatttgtattttcgctgttgtttttagccgtatcttaccttgtgatgctcacgtgttatagaaaaggcattttttggaaagtgtaggcttttaaaaaatgggctagtcagactagcccattaaattagcaattaagctctgttatattgcatggctttgtttatcgagtagatacaaaattgactgataactaatgccactgtgctcagttaaaccaatttcacagctacggctgttagacacaccgcgactacaattttttggcacgtgttgtttaagggtttttaacgcgttgctatttagctctggcaagttaaatcctttatcaccggcaaaaccacaacactcaatatcagctggaataatcacttcattgctacatgccttggcaagcgacactaagctttgctctttacctaatcgctttgagctacaagtaacatgcagcatcacaggctcattcactggcgttacttgcaaattaggcagtaaatgctgggctgcaaaatcagcactttcgtaaattgagagtgatgcattttgcgcggcattgagagtggtgagcgcacaagggctggcatcaaaaacgatgggatattggccattatttgaaagcgtctcaagctcagtaagtaactgctcacttttgtttaaaaactctttattcaaccctttactcgcaaatggcattccacaacacagtgaatctacttgtttaggtattacaacctcaaatcccgctttttgggctaatgaatgcataacatcaatcagtggtcgtttatcatcggcaagtttatccgctgcaaaaacgcgagttgcacagctaggcatatacaccaactttttagcctgttggggttgtttagaattattatttattggttgctcccctcttggccaagccgagtaatacagcggcgtaccaagcaacttatgggcaggtttactaaggcttcttaggttattactacatattgctttttcgagcacgtgcatcacgtttaagccaaatcgagcgccagatgcgacaactgcaaaatgctgactagcaaagcgagctaatgaccgtgtcactttgcttgaagaggcttgctctgctctgagcgattttataaattcgcccgtgtttattccgaccgggcattttagcccgcaaagtcccgtcgccgcacacgaatcaataccaagatatttaaagtcagcctcgataacactgagcttttggtttaatttctgcttactcgctaaatcatcggttgttagcaattgattgtgtaactcagtgcggtgtcgccacaaggtgatacgctgccttggtgttaaggtaagaccttttgatgggcaaacaacttcgcaaaagccacattcgatacaggtatcgataatatcatcactttttggcatgacttttaaatgctgagtgtgggcatttttatcatgattaataatgacaccaggattaagaatgttgtgttgatcaaatagctgttttagcttaaccattacagcgaaaccatcatcgccccactctgttgctacaaaaggtgccatgttacgccctgtgccatgctctgcttttaaagagccttttagctcaaccgctactaggttagccacatcggccataaattgctcataacgattaacttgatcctgtgtatcaaacgcttgggtgaatacaaaatgcaagttacccgctaaagcatgaccaaaaataatggcttcatcatagccatatttaatgaagagctgatgaagtgcgttcacgccttgtgctaatttatcaagcgtgaaggcaacatcttcaataattacggtggtgcctgtttcgcgcacagcaccgacagcaggaaaggtgcctttacggatattccaaagtgccgcattacgggcactatcagcagaaaaatcaatcgcagctaattggctttgactaaactgtgcaataagttgctgcgtgctttgtgttagtaacgcaagggcatctgtattctctgctcttaactcaattaaaagtgccgctgactgctcgggatagctggccacttcttttggcattatggcatgctcagacaccgacatcagggcacgtttatctagtagctcaaccgcagcaacatcaagctcactcagcctttgcaccagatcacacaccttgctgatatcatcaaaaataaagaaaccggtatgtttgtgtgcgtgctcaatcactgtgtgataggtaatatcagcaataaacgccagagttccttcagaaccaataattaaatgcttaatgatttcaattggatctgaaaaatccagcaacgcatttaaaccataacctgtggtgttttttaagcggtatttatgggcgatacgctcacttaagtcgctattttctttaacactgtcaacaaggctcattaactcatcaacccatgccccatgactttgtaaaaacttttcacaactttgactatctgcggtatcaagcacagtaccatcagcaaaaataagggtcatatctttgactgtgtggtagctgttttgtgccaccccacaacacattcctgatgaattatttgccgccatgccggctactttacagctgttaatcgatgcgggatcagggcctattttcttaccataaggtgccagtatttggtttactcgcgctcctataatcgcaggctctagacgaatagcttcaccatcatctaaaacttcaaattgactccagctatcacacagtaacactaatactgagtcagtaattgcttgccctgacaaactggttccagctgctcgaaaggtaatagccaccttatgttgttgtgctgcacttatcacatgctttgcttgattttgattactcaccaatacgatgagctcaggcaccaaacgataaaaactggcatcagtgccgtaggcatatcgacgtgagtaatcttctattaatgctgactctggtaaaaaaggtgtaatttgctgtttaaatgcgtgcaattgagtaaaagccatctcgccccctggcctgccatatctgcgctgataattatggaatatattattactttaatttgccttaaaaagcgaccaattaaattgataaattatcaattcactagcacctttgcagtaataaagacttggttatttaagcttaacagccctatttggtgatctaacttagctttttgcagttagacaaaaaaaccgctagggtagcaaaaaaatactgtatttatatttaaaaacccattaacatcaagaataatttattctaaaaatcaaataagcgtttagctttggagcttgctgtgttaaataagtttgcactatcgtcactggttatcggattagggtgtttcatgccattacaatcatcatttgctgaatctgcgttaactttaaaacaacagttagggcaaaagctgatgctcgacttgcgctattactgtgagcaagacaccggcgagcaaaaatgtcgaacgccagtcacccgcttacctgctgatttagctaatatcattagcaaacacaacattggtggtgttattttatttgctgaaaatatcgataccgtgccccaagtaatcaaacttaataacgacttacaacaagctgctgcaaagtctgaacttggcttaccgctatttatttcaatagaccaagaaggtggccgcgttgctcgtataccacgagatgttggcacttcatttaccggtaatatgtcgattggcgcaacttataaagaacacggtacacacttcgcaacagagtctgcccgtataatcgcagaagagctgttggcactgggtgtaaatgttaactatgcgccaacagttgatgtgaacatgaacccagataacccagttattaatgtgcgctcatacggcgaagatccgcagttggttgcaaaactaggtggcgcacaagtggcagggtttgaaaataatggcgttatttcatcgttaaagcactttccgggtcatggtgatacaaacgtcgatagtcatactggcctgccaaaagtaatgcatgacaaagagactatttggcagcaagacttaccgccgtttaaagacataattaaaaatcagcaaccgggtatgattatgactgcgcatattcaatacccagccctagatgacagcacctttgttagtaaagaagggaaaaccatgatcaagccagcgaccatgtcgcgtaaaatcatcactgatttactacgtgatgagcttggttatcaaggtgttgtgatcacagatgcactagacatggctggtatcagccacttctttgagccaatcgaagcggttgtaaataccttcgctgcgggtgttgatattgcccttatgccaatcgaaatcagaagtccaaaagatttagaggtacttgaagctcttatagaccgattagagcaagaagttcagcgcggtactttaaacgccgatgagatcacagcttctgcaacacgtattttaaagcttaaagaaaagtttaagctcacaacaaagcttgatgatgaagcagccatcaaaaaagcacagcttttactgggtgaccaaagtcacagaaaagtagaggctgagttagctcttgcagctatcaccgaagtaaaaaacgagaacaacacactgccactgaacattaaatcaggtacaaaagtacatatcatcatgcctgatacgcgcaaatgttttgccctacaacaagcactacttgataacactaatacactacttagctttagctgcactagcttgcaaggctatgagccaatctcgaccttaaaagaaatgaataaggccgatgtgatcattgctgcaaatgcatcaccaaaacaaagtgctgttgaagtaggcggaatggatgatttagctgataatcctgaatttgctatcgctaaggcagatcaatcagcagcactagagtcattactaaagcaagctaagctagcgaacaagaaaactgtttttgttagcttacgagctccatacgatatttcacaatttggcaaatttgccgatgcagttcttgccacttatgcttacaatattgatatagacaccgaagaaaagattgctggccctgcgtttactgcacttgcaaaagtgctgatgggtaaggcctctgcaaatggacaactaccagtaactgttaatggcttaaactgagtgctattgtagcagcatcagttgagtgttaatttcaaggagagacacatgcaaaaagatgcatcattaaccacccctgccgctattcgtaaaatagtgagagggggcgactacagcggaaatacatctggctttgcgccagggttcgtacaggcaaatttggtcattttacccaagcaatacgcgtttgattttttgcaatttagtcaggcaaatccgaaagcttgcccaatcattgcaacaagtcgattaccaggcgtaaccgatatgcctacggttggggaagatattgatattcgtagtgacttaccacgttatcgcgttttcaaaaatggtcaaatgattaaagaagtaactaacattaccgagtattggcgtgatgacttagtcacttttttaattggttgttctttctcgtttgaagaagcacttattgcagcaggacttgaaattcgtaacattactgaacaaagaaatgttcccatgtaccttacaaatatcgcatgccaaaaggcggggatttttcatgctaacatggtagtaagcatgcgtccgatgaaacctgccgatgctattcgggcgattcaaatttgtagtcgctttccgggggtacatggcgctccagtacattttggtgaccctgcagcaattgggattaaggatattaataaacctgaatttggcgatcaggttagcattcgtgaaggtgaggtaccggtattttgggcctgtggtgtaaccccacaaatagccattgccaatgcagcacctgacttttgtataacccacagcccagggcatatgctgatcaccgatattccaaacagcaaaatggcagccttttaatatgacaataaaactcaattgcgaccttggcgaaagctatggaatgtggaaaatgggcctcgacgagcaagtaatgccgcatatcgatatggctaatattgcctgcggttttcatgccggagatgccgatgtaatggccgcaaccttagctcttgccaagcagcataatgttaccattggtgcgcacccaagttaccctgataaacagggatttggacgtcgctctatggcaatgagtgacaaagagctgagcaattgtctttattatcaaattgcagccattgatgggatggctgcagtacatggtttaacgcttgaatatgttaaacctcatggcgcgctatataacgatatgatgagcgatgagcgtattttaaatgtcgttatgcgtgctgttgctagttatcctaagccattaaagttaatgattttagcaactaatctttctgccaaacatcaagccatggcaaacgagcttgaactcgagctgatattagaggcgtttgccgatcggcaatacactgatgaaggaaagctcgtatcacgctctcttgcaggcagtgttcacgataaatcagcattaatcgcacaagtaaagcagctattggagcatggcacagtgacaacgcgaagcggtcagcaactggctcttcatgccgacagcctctgtgtacacggcgataatgaagcgggtattgcgctaattcaagagatcaaagcattatgtcagcaagcctaagcgacgactcgctcagcacacacattgaaaccatgatggttgagcaaaatccacgtggtatgcagcacttgtacgccaagcaagagactggcacctatttacgtgcggcaaaatctcttcatcacgcgcaaggaaccgtgttgattggaactggctttgcggtcaacaataccttcgaaaccgacggcccggtaggtgctatagcactttacaaagtactcgaaaagcttggtaaacagccgattttggttactggcaaccccctttacagtgctctaaaaaacgattttaactgttttgagttgccgattaacagtattgaaaatgcccgcacctttagcattaaagcccttgagcagttaaagcctgattgtgttttatcaatagaacgtccggggcttaacgaacatcagcgttattacaatatgcgcggtattgatatttctgagcattgcggctgctttgatttttttataacagaagcaccttgccccagcatagcgattggtgatggcggtaacgaaataggcatgggtaaccttgcacagcatatgcaagcacttaacattactccttgtgtaaccccttgcgatgagcttttacttgccgatgtatctaactgggcggcatacgggctaattgcttttttaagtcgctggcataacacagatttgttggctgatattgagccactcaacattttaaattacctaagtgagcgcggtagtgtcgatggcgtcacccataaaaatgagctcaccgaagacggcttgcacgcgatgcatggccaacaattaataactcggcttcgccaacttggcggctttacgacagagaatgaggtttaacaatgggcacggtatacctaaacggtgaataccttggcgctgatgaagcaaagatttcaccaatggatcgcggtttcttatttggcgatggtatctatgaagtgatcccatcataccacggcaaaatgcttggttttggtgcacatattgaacgtatgaataacggtttaaatgagcttgaaattaagctcgattacactgccgatacgtggcgtaaaatctgtaatgatttatgcgagaaaaaccaaggtgataacctagggatttatttacacgttagtcgcggcgccgacactaaacgtgcccacggctacccaacgaatattaccccaaccgtatttgcgtttgcttttgaaattccggcagagccaaaaagcgacatagatagcgcaacaacttacactgtatcgcttgaacaagaccgtcgctggcaacgttgccatattaaatcaacggcactgcttggcaacgtgatccattaccaacacggtgcagcagcgggtaacaaagaaaccattctatttaatcgcttagaagaaattaccgaagcaagttcaagtaatgtgtttatcgtaaaagatggcgtgatcagtactccacctcttgataaccaaattttaccgggaataacccgctggttaataatcaacattctacacagccacagtgactttaaagtgcaagagcgcattattagtaaagatgagttacttgatgccgacgaagtatggatcaccagcgccactaaagaagttggcccagttgtaaaagtaaatggcaagttagttggcgatggtaaacctggtgcagtttggcaacaagtacaaagcctgttttctaagcataagtttgattactaatttaatcgtaatttaaaacaaacgcctacataaagtaggcgtttttgttttagcttttatttggtttataaggccaagcttgcaatagaccgtcgctggtttctgaatacaactgcttaccatcgtaagccacactcagtactgatgtacgttggcgctgttgtttagcttcgtattcagcaatgagttcaccatctgcaacgcgatataaacgcatcttcatttttggtgagcctgttaatagccatttatcttgattaataaattgcgatgcagtgaattcaataaagttagagtatgaagacacttcagatagctcttttttattggctaaatcaaaaaatacacgatcatcaaccgagtcaattgcaaagcccaagctcgctgttttatttaacgtaacgtgattcactctagtcgctaaacgctcttcaaagcgagtgctgccatcgttcgttgaccaaagcttaacgtacttgtcgcttgagccggtaaacgcccactgaccatcagccgataacgccacgctattaatatctaaacgatgaatatcaaaacgcttagtatcgcctgtgcgggtatttatcacctcagctttgccgctacgataagcaataaccaacgtatcgcctacggctgaaatagcgatgtctctagcgatttcttgcccggtaagccaagtaccaatactacgcccagtgcgagtatcgtataaagtcaacgataatcgatttgaaatgaaaaaacgagatttgttagcgctaaagcccacaagctcaacatgttcagcgccctgccctgttatacaatcgtataaacgcgcttttaactgattatcccaaacgcacacctcagattgagttgccactaatgcgtgactcgcatcttcggttagcgccgaggcacttagtagctcattgccatgggcaaattcactactagcaggggcagtaaacacctcacctccaccacagcccacaaggctcagtgcaaatacacaagcaagaggtttaaaaagtttcgacgtcatgatcattctcaatttttataattattttatattggagcagtgtaatgaaaataagcggaagttggtaggggatctagccatcagctttcagccgtcagccatcagtttttgtaggcgtgaaatttatttcgcgcgactttttgcgagttgtaggtcgtgctttagcgcgttttctaaaaagttcgctttgcttaccatgagatctattgttctagttagtgcttgaaacagattcacaattaacagtcgatttttttgatgttttatctaacttccgaatcactaaaagctcctcgttttcaacggttaaacttacatttttataccaatcatcaaaactgactttagttgcactagctggtaattcaaatccaaacgcagaatcaatttgctcgaagcttgttggaatttctttcttcaaacaccagtataatccactcaaagcgccaaaaatatcgtctggttcttctgcgtatacgggatgccaaactaagcaagagacaatgagatacactaattttttcatatttctgtacatttactttaaatgaattgctatcactaacatgtgtataaaacaccggagcttgtcaattttgaccatgcatactttacaaggtataacagttctactcataattacctgaaaaccagtataaatgaaccataatgttctaagctggtgaaacttattctttattatctaaaacctcagttaaataggctaggccctgtttcctagagcctagcgcctgtaaactttcaacctgatagctgacagctcactccccttacccatgcgtaaaacaaaacacattaagtttgttaccgtctaagtctctaaagtatcccgcataaaagccgggcatttcacgtgggccgggggcgccttcgtctgtgccacctaattctatggcttttttataaaaggcatctacttgggctggggtttcaacagctagagcaatcatagtgccgttacccactgtagctttttcatcgttataaggtttggtaaccgcaaaaccgggcttatcttgaccagtgctccatgcgacaaagcggtcagtttctaaaaagcgctcggcgtttagagtggcgaacaattcatcgtaatactttactgctttagctaggttgttagtgcctaacatgatgtaacctatcattgtgtgctccttacgtttaaaagtgtctgtactcaacataaaagggaaatgaccatctgtctattgatttctccattcatcgcaatggactatatttctgatggttgttactttataacagattaacacgccctaatttctgctcactaacaaggaaataaaatgaagtttaaaacgtctttagcactgcttgcagcagccagcttttacagtcatgcaggagctagcaatacctttcaacttgaaaatgtttttgatcttgaatacgccaaccaaatagaaatgacaaaaaatggcgatacaatttactttgtgcgtaatcgcatggatatcaaaagcgaccgtaaagtcagtaatatttggtcagtaaacccagatggtaaaaccatgctgccgctaacgtctggcgtgcatatggattactcaccggtgctgtcaccagatgaaacgcgtttagcgtttatttctacccgtgatggtagtagccaaatctatgtgaaatggttaaaaaccggtaacgtagcaaaaattagtaacctaacgcaaagccccggcggattaacttggacgccagatggcaaacaattggtgtttagccagtttgtgccagcaaaatcagcaagccctgtgtctttaccgggtaagcctgaaggcgccaagtgggcagagccagctaaatatattgacgatacctattatcgtgctgatggcggtggttactcagaaaaaggttaccgtcacttttttatcatcagtgcaacgggcggcaatgcacgtcaattgagctctggtgattttgatcacggcggagctattagctttaacgaaaaaggtgatgcattttatttttctgctaatcgccatacagataatgaactgaaaccaacaaattcagaagtttataaactaagtttaagtgatttatcgatcacacaaatcactgaccgtgttggacctgattcacgcccaaaagtgtcacctaatggtcgttatcttgcttatacaggctatgatgacaaaaaaactaactatgaaaacaacgacatttatttactagatttgaaatcaggaaaaacctcggttctcacagcagatttagatcgtagtgtcgaagatataaaatgggatgatagcggcagtggtctttattttagctacgatagcgaaggtaaaacacatctagcttaccaaccgcgtagtggtaaacataaagtaattaccgacaaaattggcagtgtcgcctttggtcgcccgtattcaggtggtgactttgatgtcagtgaagatggtgaagttgcattcacactcgctgatacccagcgcccagctgatgtagcattaattaagcgtggtaaaacggcccgtttaacgcaattaaatgaggatgcacttggcgacaaagagcttgccaaagttgaagagatttgggttaaatcaagccatgacggcttagcaatccaggggtggattgcatacccaccgggctttgacaaaaacaaaaagtacccgcttgttttagagatccacggtggtccagttgcaaactatggccctcatttcagccctgaagtgcaattatacgcagccaaagggaatgttgtgctgtatatgaacccgcgcggcagtgactcgtacggcaaagaatttgcgcaaacaattcatcataactaccctagtaatgactttgatgacttgatgacaggtgtagatgctgtcatcaataagggctttattgatgagagtaagttgtttgttaccggcggttcaggtggcggtgttttaactgcatggattgtgggtcatacagaccgctttgcagcagctgttgttgctaaaccagttatcaattggatcagctttgtactaactgctgatttctaccctttctttgctgactattggttcccaggtaaaccatgggacaatattgagcattatatgaagcgctctccaattagctatgtgggcaatgtaaaaacacccactatgctgttaaccggcgaatcagactatcgcacgccgatttctgaaaccgagcaattttaccaagcgttaaagctacaaggtgttgataccgccatggtgcgtattcctaatgcatcacatggtattaccgctcgcccatcaaacctgatgagtaaagtcgcgtatattcaatggtggtttgataaacatagtaagtagtggcgagttgcgagttgcgagtggcgagttgcgagtggcgagttgcgagtggcgagttgcgagttgcgagttgcgagttgcgagttgcgagttgcgagttgcgagttgcgagttgcgagttgcgagttgcgagttgcgagcaatagtttaggcgcggctttatgccgcaccatacccaaaacataaaatagtttcacacttacctgtagcagcggctttatgccgcgtcatttaataaaaccataacgcggggtaaacccgctgctacttgctaactttcccctttctaactttcccctttctaactttcccctttctaacttttgaatttcaatctgatagctgacggctgaaagctgacagcttccttttgactgtaaaccccctttacagtcaaaatgtgagtaactccttacataccttttttaaatatcggacattaatccaaaagcagttggtaaaaaatcggtttatagacaaaatcagtaacttgagttagtaaaaaatcggtttgtgccgctaaaaacctagcttcagttagtaaaattttggtttatgagcatattgagttggtaaaaaatcggtttatcaatgacgtgagttgataaaaattcggtttataaatcgatagagtttacaaaacagcagtatattgccgtttatatgagccaattttagcgattctagaggcagtaataaggtgacaacccctaaattaaggcttataagacggagctagttaaatcctgatctaaaatttttaggctggtaaatacgtgatctgtatttttataaagctagtaaatggctgatccaagacttggttaaagagtgatccgaggtgcgaggtagcagaatttacatcacgtcctagaacctagggcctagcgcctgatgacgcggggtaaacccgctgctacaaataggtgtgaaacgagtctgacggctgaaagctgacggctaaaatgtgaaaaagggcccgaaggcccctaacaacattattgaatagctataaaggaaattacaacttggttagaactggttcatggtatttgcttcaccaccggctttaagcgcattttcaccagagaagtactctttatgagtatcaccaatgttagaacctgctaggtcttggtgtttcactgatgcttgctcacggcgaatttcttgacgttgtacgtcgcgaacatacgctagcatgcctaggtcgccgaaatagccttctgatagaatatcagtgcttagcgccgctgtatggtaagttggtagcgtgattaagtggtggaagatacccgcttcacgtgcaccatctttttggaagttttgtacaagtacatctgctgccgctgcaagctctgtgtcatccatttctggcgccattaatgccttattatcatcgatgcttgggtaagctgataagtctttaccttgctcttgccactcagcatatacttgctcacggaatttgagtgtccagttgaacgacggagagttgttgtataccagcttagcattaggtacttgctctttaacgcggttaacaagctcagcgatttgtttaacgtttggtttttctgtttcaatccacagtaagtcagcgcctgattgtaagctagttacacagtctagaactacgcggtctttctctgtgccttctcggaactggtataaaccattatctaaacgtgttggtttacaaagctgaccattcagcttcattgctgtgtcgccttcgtttaagtcatcaacactgtttactggtgttgtttcaaggaacgacgtgtattggctagcaaggtcgccaggtgttttagatactggcactttttgagtaaggcttgcacctaatgagtctgtacgagcaacgataatgccgttatcaatacccagctctaagaatgcgtaacgaacagcgttaatttttgctaggaaatcttcatgcggtacagttactttaccagcttggtgaccacattgttttgcgtcagatacttggttctcgatttggatagcacatgcacccgcttcaatcatctttttagcaagtaggtaagttgcttcttcgttaccaaagcccgcatcgatatcagcaataattggcacaacatggctttcgaagttatcaattttatctagtacagcttgaacgtcacctccgtttgctttcgcttcgtctaggtctttgtaaaggtggtcaagttcacgtgcatctgcttgctttaagaaggtatagatttcttcgattagcgctggaacagacgttttttcatgcatactttggtcaggtaatggaccaaactcagagcgaagtgccgcaaccatccagccacttaggtatacatagctacgtttagttgttttgttatgacgtttaattgccatcatcatttgctgtgcggtgaaaccatgccaacaacctaatgattgtgtgtattggctgtggtcagcatcgtaggctgccatgtctgcacgcataatgtctgcagtgtattgagcaatgtctagacccgtacgaaaacggttttgtaagcgcatacggcttgcgtattcaggattgattgactgccacgttttgccttgtgtttgacataaagtagctaggttatcggtttcgcgttgatatgttgtcataataaaagtccttcgaacgggttatctattttttgttagtgagagtggctactggcgtttgcttcgtagcgcttaattcaacattaggcggattttttggatttagtaaatttatagttgttattgccactatatttttagtgaatggtaaatagcctgcttattagccttttttacgatatggttgaaccatgaatgatcaaattacgctcgtttaaaggacattattatgaccactctctcacttaacggtttaagcgttgatcaacaacttgcacagtttgttgaacagcagcttttacctggaacaggcattagcacagatactttttggcaaggttttgctgatatcgtcaatgaattaacgccaatcaatcgcgcgcttttagaaaaacgcgaacaactgcaagccaagattgatgactatcacaagcagcaaccggtatgggatgcagctaactatcaagcatttcttgaagatattggctatctcgttcctgagccagctagtttcagcatcgaaaccgagcaggttgagcctgaaatcgccagcaccgcggggccgcagcttgttgtgccagtgagcaatgcacgctttgccttaaatgcagcgaatgctcgctggggatcgttgtatgatgcgctgtacggcactgatgttttaagtgaagatgacggcgccgaaaaaggctctacatacaacccagtacgcggttttaaagtaatggcttatgcccgccagttcctcgataaagcattgcctttagcaaatggctcacacatcgaaagtaccagctatgcagtggtaaataatgagcttttaatcacattacgtgacagcagtcaggttcgcctagctaaccctgaacaacttattggttaccaaggtgaagcgcaaaatccaagcgctatcttattgaaaaataatggcttacatatagaactgcaaatcgaccatcatcatccaataggccaagcagataaagcaggcctaaaagatgtactacttgaagcagccctcacaacgattatggactgtgaagattccgttgctgccgttgatgccgaagacaaagtaaacgtctatcaaaactggcttggtttaatgcaaggaaacctagtagaagaatttaacaaagatggcaaaaccattgagcgccgtttagcacaagaccgccaatatcaaggtgtaaatggcgaaacaatcacgctaaaaggccgtagcatgatgtttgtgcgtaacgttggccatttaatgacaaatccagctatccaagatagtgaaggcaatgacgtgtttgaaggcattatggatgccattatcaccagcaccgcagcgcttcatgatttaaaaggcacaagcaaccttaaaaattcaacggctaatagcattaacattgttaaaccaaaaatgcatggcccggaagaagtggcattcactaataccctatttacccgcgttgagcagctgctaggcttgcctgcaaacaccattaaaatgggtattatggatgaagaacgccgcacttcagctaacttaaaagcctgtattttcgaggctaaaaaccgtgttgtattcatcaataccggtttcttagaccgtactggtgacgaaattcatacttcaatgcaagcaggtgtagtattgccaaaaggcgctattaaacttgagccttggatcagcgcatacgaagaccgcaacgttgatattggcttagctacaggcctcagtggtaaagcacagattggtaaaggtatgtggccaatgccagataaaatggcgttaatgatggaacaaaaaagtggtcacccgaaaagtggcgcaaataccgcgtgggtgccctctcctactgctgcaacgctgcatgcaatgcattatcacgatattgatgtatttgcttgtcaaaaagcgcttatggaccgtaaagaagcaagccttaccagcttactcactccaccgcttatgaaagatgccagcagcttaagcaaagaagatattcaagccgaacttgataacaatgcacagggtattttaggttatgttgtgcgttggattgaccaaggtattggctgctcaaaagtaccagacatcaaccatgttggcttaatggaagaccgtgccacactgcgtatttcaagccaacacatggccaactggctgtatcatggtgtttgttctgaagagcaaattagaaaaaccatggcacgcatggcgaaagtcgttgatggccaaaatgaaggtgatcctgcttacaagaatatggctgattcagccgaaaccttagcacaaagcgttgcttatcaagcagcgttagcccttgttttagagggagttaaacaacctagtggttatactgaaccattattgcatgcgttccgtataaaatataagtcgttaaattagccactacacaactctccttcgagtttcatgtgtcgttcatagcagcctaagggctgcttttttttgactaatatcaattgaactcataacgacagtgaatactcatcattcatggcataataaaaatctattaaaaaaggggcatttgttaccaaatgcccctttttacgtactaatacgtactaattttttaaaaattagtttttgacaatcgcattgtgataaacgttttgcacgtcatcacagtcatctagcatagaaataaacttttcaaagtttgcgatatcatcaggatctgtgatgtctgtatgaacttgtggaacaaacgtgatttcgtctacttcaaagttaataccttcaaatgcttcttcaagggctgtttttgctttgtagtactctgtgtgaggagcgaatactgacactttgccgtcttctacttctacatctgttacgtctacatcagccatcattagcgcttctagtaccacttcgtcgtcatcaccggcaaagcctaaaacagctaagtggtcgaacatatgcgctacacaacccggtgtaccaatttttgaatctgtttttgtaaacggtaaacgtacatctttgatagtacggttagggttatcagttaaacagtcaacaataaccatacagttaccagggccgtagccttcataacgtgcaggagaatagtcttcccctgccccaccggccgcttttttaattgcgttatcgattacgtgtgctggaacttggtctcgtttcgcacgctcaataatacgctttagcgcttggttaacttctggatcaggttcgccatttttagcaacaacgtagatttctttaccgtacttagaatttactttagtttttgcattggctgttttagccatggcgtttttgcggacttcaaatgctctgcccatcttatgcctctatgaatacatttgataattgccgatattttagcaactcatgaacgcttgggctagtactagggcattttgaaaaataaaaaactaacaataaatctcaggaaaaataaaaaacaagactatttaacataacatcttattttcttgaaatgagccaaccaatttaggtaagtctgaaaaatgatgcagtacgtagtcagcctgatttgcgtattcaggaatttcatccggagcgtacaaacaagcgcgcatatttgcattatgggcagcttgaatatcaaataagtaatcaccaacataaagtagctcagactgatcaagctcccataatgtcgcaatagcattcaaggcgcttggatcgggcttagcaggcgcatcagagcgagttaacactgtttctataggtaaagggttattctttaatttaatggcagcagcacggtcatagtttcgagtaacaattgccattgggatattgttttcttttaaccgtgtgatggcatctgcaacaccaggaagtaaatgtgagtgctgggcatctaacaattcatgctgatgtactatgttcatcgcttcttcacgcatataaggtgaaggtaaagaagcgatataagcgagtaagtctttttctacaggacagccaacctgcgctttgattaatgaaaaatcaagttcagaagaaaccaaggtgccatctaagtcgaagattacaccgcgtatattgttgtcatggatagtcatataaatccctgtatatgagaattgggaaagttttggtgcccattaataagatagtttacgaaatcagttaattaaaggatcaaaggattaaaaaagtaacttttttaatcctttagtataagaaaattatggttcaacaggctcaaaccttgcctcaagccaagtgtcatcttgactaaacgtaagagttttaactttacctttgccttcaatgtttaccatattaacttgtgctggccacaggtcacgtaatgctccgttgctcattcgaataccatgaattccctcagggatcgttacttcttgataaacccaaaagaatttaccatcaacttgcgcacccacatctttaagctcaagcggcttaccatctaaagtttgtagggcaatatgtgactcaacataatcagcaaaacgcttttggtcgtctttattacttaaaatatcagcatgaccgtcaaataagtgctctaccgcatgctcagtatcgtgtaaataaaagcgatgcattagctcaatattattagtgcgtttattaaaaagtaccgttgttacagatgcttttaactggtgcgccatagttggcgcactcagtaataaagcaaaaataatggctgcaaagcgcattattgttgctcctcagcatctttttcgtcgtcttttttcagctcagttttaatatcttgcatgatatcgcggctaactttcgctttactcttctcacgtttgtacacttcaatacgtgatggaataatacgacgcggatagttattgttttctacatcaacatccgcagtttcccaacgcgggtcaactgtaacagacactagatttttacccttatcagtgacaatgagcttttgaacatgcttgtgattacgacgccagatttcagcaggaatgtactgctcttctttcgtaccatcttcataagtaagctctaataagataggcattactaaaccacctaagtttgagaactcaagtacgtagtagtttttatcttctttgattgcacgctcaaacgttttacgttcccaaggttctaagccttttaggaatttgttatacgcgttgcgctctttattagttaccgtgaagcggtcattttcgtcatagaagtcagttacatctggattttcttcaacccacagttttttaccttcttctttattacgttttacgaataacggcattggcttatcagcttcgatatcgcgtaaacgattaaagtcgatatcagggtttttcgtatctagacgtagttggtaaactttatctagcgagatatcaacgtgatctgtggtgtagaaccagccacgccagaaccaatctaaatcaacaccagacgcttcttccatagtacggaaaaaatcagccggagtagggcgtttgtatttccaacgctgtgcatattctttaaatgcaaagtcgaataactcacggccaaggatcacttcacgtaaaatgttaagtgctgctgcaggcttagtgtaagcatttggacccaaacgcaatacgctgtctgactgagtcattaccggtacttggttttctgacttcatatactcaacgatatcgcgaggctcaactccccacgggattgtgtggtcccattcacgacctgcaactccatctaagaaactatttaaaccttcatccatccacgtccactgacgttcatcagagttaacgaccatagggaagtaaatatgaccaacttcgtggattacaacgccaattaagaagcgcttttcagcttgtgagtatgtacgagtaccatcgtcttgtaggtcagttcgcggaccattaaaggtgatcattgggtactccataccacctacagggccatttacagactgagcaacagggtaagggtaatcaaatgagaagcgcgaatacacttccattgtatgaacgacagcttcagttgaatactttttccaaaggtcgccaccttctttcgggtagaaagacatcgccatcactaacggctgatcgttaccaccttgatgatagcctttagcatcccacataaatttacgtgaagaagcccatgcaaagtcacgaacattttcagctttgaaatgccatgttttcgttttatcagtgccttctttttcgttttctagcgcttcttcttcagtcacgatgaaaacaggtcgtttagcgttttcagcttcttctaaacgtttacgctgcgtgctagtcagtacattacgagcattatcaagtttaccggttgcggatacaatgtgatcagctggcacggtgatctctacatcgtagttaccaaattcaagcgtaaattcaccacttcctaagaatgctttgtttgtccatgcttcgtagtctgtgtatgcagcaagacgcgggaaccactgtgctagcaaaaagatatcgttaccatcttcttcaaagtgctcataacctgaacgagcacccacggcatcttcttcaacaatgttaaaggcgaagtccatgctgaactcaacgtctttacccggtttaagtggctcatttagatcaatacgcattaaggtatcaaccacagttactttaagctcttttccgtcttcgtctttaacattggcgatttgatagcccagctcattgtcagccataaactgctgacgacgtaactgacctaagctcagttttgtcgcttttggctgagggtcaccttgcagcgttttaccattgaaggttgatgtcatttctgcaattgagtcagatttaaagatattttggtctaactgtaaccaaagatactttaatgtatgaggtgaattatttttgtactcaattttctgacttgccgttaaacgacgttttttctcatcaagctttacgtcgatgtcgtagttaacttgttgctgccagtaattttctgcaggtgctccagcggcactacgataaacattgggagttgggagtgcttcatccagttgacgaaacttgtcaacaaatgaaccttttgtttgctcaactgatgatgccataaccgtagacgatacagctaaaggcaataccaaagcactcagcgttagaactgcttttttcattgttaatcctgtaaattttgcgtgagcgtaccttctcaaactgctaacaaagttgcaataaaataacgataaagtgcggtatttttcaggtagtattcatacttttaaaactatttatttttgtcctgccaaatagccttttaagtacaagtgtaaagggggtttacattacacttgctcaattttagttcagcacaaattcatgccaaagtattaatgttaaatataaaggtttttgtttaactagtttaactatctaaagaaagattaaatggtctgttaaatgcataaaatagtgtgactgaagtgtaataaagataccgtcaaattttgcacataagcttaaaagtgaagggtgattagatgaagttttatattgtaaagaaagactctcgtttagcagccattccagctcaagaagcaattcttaacgagtacgaaaatcgtggttttgaatttgtagaagtgattgccgcctgtgatgagtcagatgcattatcgcgcacaaacccggtgataaaaaggccgaaaaaatggctgatttatccaactgccttcataattttatcctttgttatatttattttcgcaataaattaaattttatggcattttctattgaaatttactgccatttatatttaaaatcgcccacttttttgattttggggtctgcgtagttcgtaattgcgcctcaaaatgttttggtaatcagcatagaattcggtgagcgtatggatttttatatcctaaaaaaacaacaagaactaattgcaattccagcggacgaacaaaattgtaaacagtacctagattcagggtatttttatattgataaagtagcagcttgtaatgaaagtaatgcacttaaaatattacaagcaaagcaaactaaagcgcttaaagtaccattaattatggctctactggcgttacctatggttgtatttgcctggtatagcttaagttagcaagccaggctgggcatcttggctcagcttaggtatattgacgctcttaataaataataagagcgttaaatgaaagtccttcatacatctgattggcatttaggccaacaactctacgagcactcccgattcgatgaacatcaagcgtttttagcttggttaaccgatacgcttgtgtcagaacagatcgacttactgctagttgcgggtgacatttatcatacggcaacaccacctgccagcgcagaaaaccaactctaccaatttattaaaaccaccaagcagcattgccctgacttacacatagtcattattgctggtaaccacgactcagcaaatcgaataatggctgcaaaacctttattagctcagtttgatacccatgttgttggccgctttgatagtaacgcccctcatgaagtagtactgtcaatcagcacaaaaaacggcgatgcgaatgttgttgccatgccatttttacgtagcagtgatttaagcagctataaccgccaacaagagcagccgttaagttataaccaagccgttgcccttgcttataaagatgcattacaagccgcaagtgaattaccaaatgcgccattaattgcgatgggccacttacatgcaaaaggcggagacatctcatcagattctgaacgtaacttagttattggtggcgaagatgcaatatcggctagcatatttacagatcaacctgattatgtcgcgctagggcatcttcataaagcacaaaccgtcgccaagaaagacaccattcgctacagtggcacgccaatgccgatgtcattttctgaaagacgctatcagcatcaagttgtgatagttgagcttagtgactcaggtactactgtaaaccccctttacattcctagcttttgtaaagtcatgttgctgccagaaaaagactgtgtgccactaaacgaactctgtgagcttataaaacaactcgatttaacagatgaagatttagcgccatacctgcgggtaaaattgagcgcccatgacactgacaccactttcagagaacaaattgaacaagcccttgaaggtaagcaagttaagttctgtggcattgaaagggttcgtcaacagagcagccagcaagacgatgaacaaaccctatttgaagatgtctcacaaattgaagcgctgaacccacactcacttttagagcaggcattcgcaaataataaagatatggcagggcaggctgtgccaaaagagctagaaagcttattaagccaagtaatcgatgaattgaatgcggaggatctactatgaaaattttagcgattcgtgttcatcaactagcctctatcttagacgccgaagtcgactttagcgcttcgcctttaaaagaagcggggttgtttgccatcacgggtgataccggggcgggtaaaagtactttactcgatgctatttgcttagcgctttataacaaaacagcaagattacgtggtgatacaggcaataaaattgactttaacggcgacaatatcaaactcaatgactcgcgaaacttattacgccgcggggcagggcagggctttgccgaagtcgactttattggccaagacaaacaatcatatcgcgcaagattaagctttagccgagcgcgtaataaagccgatggcaaattacaacccgcacaacatagcctgtactcattacctgatgaaactctaattgctgataggagtgctgctggtaaagaaatcgagcgtattatcggcttgagctttgagcagttctcacgagcagtactgcttgcacagcatgaatttgccgcctttttaaaagcaactggggatgagcgtgcgcaactacttgagtgtttaacaggcaccgataaattcagccttatcggtaagcgaatctataagcgccacgatgagcaattgcagatattagagcagttaaaattaagtttaagtaactatcaggttttaagtcctgaacaggtcgaaactaaacaaacagaacaaaaagcgcttgaggctaaacttactgagttgcaaaaacaaataaaacaatttgaacagtaccaagcgtggtacaaacaagcatctcagcagcagcaacaactaaaccaagctgagcaagccaagcaagagttacagcaacaaatgcacgcgcttgctgaaaaagccactgaagcgaaacaagctcagcaatgcctagaaataaaagataaccgcgaacgtgtggcgactcttagcgttcaacatgagcaactaattaaaaaccgtaagcagcttttaaacgttgatcataaaacgctgatcaaagacgctgagcaaacccttgaaaagcaaaccgcacaactaaaccaagctaagcaagcacaaaaagacgcgcaacctattattagcctggcccgtgagctagataagcaacttgcggttttaaaccagcaagcagcggcgcaaaaagtacacgcagagaaagcgaaacaccatcatcaagagctgagtaatacacttaatagccataaagcagagcagcaaaaacagctagagcaacaagcacaaatcaataactacttagaaacacacgtacagtggcagtcattagcgaaagactggtcattctataaaagtgagttaagccgctttagccagcaacagcatacaattagccaatcacagcaaaatgtaaaagctcttcagcctaaaattgatgagcagcaagcagccgcgcagcagtgtaaaactcaataccaagcccttgagcaagaaattaagcgcttaaacgagcaagatgccgcctttaaatcgagtttaaatactcaatcaatggccgatatcgacgctaggcttgatgcgattaagcacctgattgaaaagcgccaagtatggcaaactaatcagcagcagttaaaaaattggcaaacccagctaaatacattaagccaaactgagcagcaactacaaacggcattgaaagatgcgcagcaaggtgaagagcaagcacagcagcaggtttcgctttgtgagcaaaacttacagcaagtgcagttaagagccagtgaaggggtcagccagttacgtgccactttaaaagctggggagccgtgcgcggtatgtggctcaaaagagcacccctttatgcatgaagaaatggtaaacgagcaatttagtcaacttattaacgactttaccaaccaactaactaacgccaaacagcacttaaaagctcagcaagcattacagcaagctaaaagtaatgagctggcggcatgcagccaacagataagctcgttaacagggcaaatctcagaactgagcgctcaacaacagaacctcaaagaaaccatggcggctaatcgtactgagctaaatgatttgaccgaagttcagttaaacgagcgtcaacaacagctcagcctgcaaaaacagcaatattacaaaacccttgagcagcaacagcagttgcaaaacacgcttgcagctaagcaaactgactacaatcaacaaggacaagcgctttatagcaaagagcagcagttaaacgaattgcagcaacaactaaataatctgcaaacacgtttaaatgagctcaatgatgagcatcagcagctttatacgacactgaatcaacagttcaccagtgcaccttggtggcaggcactcaatacacaaaacacttctttagagaacattgctgagcacgttgaggcttatcaagcttcgctgcaaactgcggatgaacttaaaacgaacttaaaagccattgagcagcatcttgcgcatttaacgccgcagctcaacgaagcagatacctctttaactcagtgcaacgagcaactaagccaaactcaaaacgaattaacgcagatacaatcaaagcgcgagggcttattgagtaacgcagcgatttcggtagatgagtttattgctgagcttgaaaaagcgatagattcagcgcagcaagcactacaacttgcccagacaacccataataatgcggtgaaggcgcgtgacgaacaagctattcaaatagctaaccttgatgagcgtgagaaagagttaaacgctgaacaatcggcacttaatgagcgctttagtctgtggtttaacgattttaaagcgcagcacccaagcttagatgagcaagccgttagtcagctattaacgataagccctgctgaaatcaaacaaactttggctgattatcacactagcgagagtagtttaaaagatgctgaggctcttttaaaacaacgacagcaggctttggctcagcatcaaaaagataagccagctctcgatgaagatgagctgcaaatacagcttaatcaagccacagagcaacaagtgcaaacaaataacgcattattgcaagttgcgacggagcttaaaacccatcaacaaaatagccaagcgcttgaagataaacaaaagcaattggttgaaaagcaaaaaagctatgagcactggcatctactcaataaggtgctaggggatgccagcggtaaaaccatgcgtaacttagcgcaaacacaaaccttaaaaatactgctacattacgcgaatagtcacttacaaaccctaaataaacgctacaaactaacagcaatagggcaaacgctcgatatcgctattatcgataaagacatggccgatgagcagcgctctgttaatacattatcgggcggtgagtcatttttggtgtcgttagcgctggcgctagggcttgcctcgctgtcgtcgaataaagtacaaataaactctttgtttatcgacgaagggtttggtacgttggacagtgaaacgttaagcatcgcgatggatgctcttgattctctgcaagcacaaggccgcaaagtcggggttatttctcacgtatctgaaatgaccgaacgcgttgccacccaagtacatgtagcgaaaaaaccaggtggttattcgaccatctctgttatttaaaggattagcatgccaacttttaatcacgaagaagcaagtcgctacgacgaacgtattttgcgcctagttccaggttatgagttattacatcaagcaaccgccgcccaactggcaaccacgctgagcgatgatgcgcgcattttagtggttggtgccggaacaggtaaagaaatcatcgaattagcggcgctaaaaccaagctggcaatttattgctcaagatatttcacaagacatgcttgatattgccgagcaacagtttggccagcataacatcagcgaccgcgtgacagtgcactgcggtgatatcaatgacatcgacactcaatgtgacgcagcactgtgtttactggtcatgcattttgttgaagataacggcgataaaaaagcgctattaaaagcgattcacagcaagcttaagaaatcgagcaacttatacattgccgatttaatgcgcccagaaaccacttttgagcgcgaatctcaactacagctatgtacacagttaggtttaacagaagtcggcgtagaacgcatgcgccacaacctagagcacgagttttacccattagaccgcattcgtttttcagagttaatgaatgaaacccgcttcagcaccccaaaacagtattttaaagtgcttggttttgctgggtatgtggttgggagttagctcgtagattgggtagagcgcagcgaaacccaacaagttagcgagctacaaggggcaagagtaaaacgacatcacgtaggcgcgaaatttatttcgcgcgatgttttgtaggttgggtagagcacagcgaaacctaatcaattgttagtagccccgcttaactttcttgttattttactttataccaaacagttacgattactgttgcaggcatccatgaaccaccactttgtgattgagtaatatttttaatttctatatccggttgagaggctaaccaaagattgatttcagtttctaaaccacaatcagatgatgtaggtgaactaggccaaaaactttgtttaggctttatgatttttgtgaatattttaacttccatttaagaattacactccatgataatttagtaatataacgtcgcaataatcggcaaggaacgagcctgagccaagcttttcggattctattttgattgcctgttataagtctttatctttaaaatgtttgcaactgagcaaactattggcagtctctagcttaatgcgcttgttagcttttacatacactgtaatcaaaatcatcctttatatttggcatttcatcaacttgaaaatagccccaaatagaaaaaaataaaaaaaacagaggaataagtatatgtgcagttaacttaagatttgcgcgccatccagtaagaatctttgtaggttgaagcacttttactcccttcggtgggaactgtccatgcataaaccccttaatacctacaggtagtgtaaatagaccgataaaaatagcacttaacaaaggaaatccgacaaaggttgaataccataagactgaaatcccagaataaccgaaaggagtgtgacagtgaacggtatctacataccattctaaaaatggaataaaccattttatgctaattatcacggctaaagcgcaagctaaaataattaatgcttttattctaatttgttcaggttttgaatattcttctgcgtatttgataatctctctccttgagtaaaagctaacgcctcaaataacaggttaaaataagcgaggcacgagcaaaaaccaactgttttgttctggtttaatgacttgttagttcacaattacaccaatactaatgaaaaaacacttagccaaattagctgaaagccatatgaaatacgctgatagatgccaggattactttgggattttacagctttggccattgcaaaaagaaaataaaccgctgcgacaacagaaagcaatgaaaaaatacggaaatataatgggataatttcagttgttggacttatagcaactaatatcggtgcaataattaatgaaagcaacatgataaaaccagcccaagaatgtaccttacaattaaaagttggattcttagtaaatggatcggcgtccattggaaagtaacctgcgacccatgtacctacaccatgagctataactaaccaacccgcaacattcactaaagttgaaacatttgagagttgagccagataccaaccgaaaaagcaaaatagaaaaccaagaggataattattaattaaaggagacaatttttcagttgggctaccagtcgcacctaactcactacaaaattgcttagaatgactataaccagtataaaacctacctgctacatatacaccaatgaaaatccagattgttgcaattaatcctgaatagatcgcaatactctcaaacaccaccaaactccctttgttaactaacattttatcgtgcacacttcgcgcatatttatgccgatgccacgctcattatgtttaataaatctactattaacaaataacggaatgcattgctaactgtaaatttttttgatgttaaagatatttataaagaaaaatggctcaatgctcactttcatcatatttgcaggggatgtagttgggaattagcgagccataaattatcgcgcgaaataaatttcacgcctacgcgatgtaaaacgctgctgcatcaaagctcgctaactttagtttgtaactcgctaagtttgttgggtttcgctccgctctacccaacctacaatagcctaataccccgcagcctgtccgtctttacgagtttctgatgcgccgtaataaacgccggtttttgggtctttcaatattgcttgataaccaccgtatgggccaaccgcgtcttgtaaagtgtggccttttttcattaactcgcggcgggtttccattgaaaaacctgactctaagctaacaaaaccaccgtcttccataatctcaccggttggctgcgatgaacctgtgtgcagaatacgtggtgcatcaccggcttcttgcaggttcatgccaaaatcaatcatgttgataagtatttgagcatgcatttgtggctgtgtcgcaccgcccataacgccataactcatatatggcttaccatctttggtgacaaacgcaggaatgattgtatgaaatggtcgtttacctggctcatattggttcatgtggccttttttaagcgcgaacatttcgccacggttttgcaatacaaagcctaattttgccggtgtcatacctgagcccataccacggtaattgctttgaatgagcgaaaccatgttgccgtctttatcggcagtcgtcatataaatggtatcgccttctactgggcctgcatggtcgcgttttgcggctttattagggtctatcaatttgcgtctttggtcagcatattgctgcgaaataagtgtttgtacgggaatggtgttaaacgctggatcggcgtagtacttagcacgatctgcaaacgcgagctttttcgcttcaacaaaggtatgtacgtattctgggctatcaaagcccattgctttgatatcgtaaccttcgagaatattgagaatttgctgtgcagcaataccttgaccatttggtggtaactcccaaagcgtataccctctatagtcagcacttactggcttaacccattcactatggtgggcagctaaatcttcatacgataagtagccgccgttttctttcatatagcgaccaatttctttagcaatatcgcctttgtaaaaggcatcgcggccgcctttggcaattttgcgataggtgtttgcaagggcagggtttttaaaaatgtcacccttttctggcattgccccatcaggcatataaacatctttaaaacctgagtatttacctcgtgcagccacacttttttgcatgtaataggcaatcaactcagacacagggaagccattttcagcataatcgattgcaggttggagtagcttttgcattggtgttttgccaaactttttatgtaactcaaaccagccatctacagcaccgggtaccgacacaggcaagggtccataagctggaatgtagtcaccctgtgcttttaaagtgtcaaaagacaagcttagtggtgaacggccagaagcatttaaaccatatagttgcttagttttgttatcccaaacaatggcaaataaatcgccaccaattccacagccagtcggttcaacaaggccaagcactgcatttgcagcaatggcggcatcaatagcgttaccaccatcttttaatacctgtaagcccacttgcgtagctaatggctgtgatgttgcaaccataccagattgcgcgatgacctcagaacgactggcaaagttatggccggtgatgcgatcgtaagcttgagaagcgcctgttgtacctaagcatactgctagtactaaacttttaataagtggagttggtttcatagtttttgcccttttttttatcactataaaaagcaattaaagatcaggcaatggctttgcgatcgagcgcgagaaaacacgattgacttcaaaaaataccaaaaccgcagctaatttaccttaaacaaagccaaattagtaaatagcagaaccattcagacattgctctgcaactggtgaagtttcaccagttgagtttatgttcccagcgacaaactgatcaataatcgccgcaatttggttttcttgcttcatgctatcaagcgccttttgcagcgcggtaactacctcgggcgatgtgtttttgttaagcgctaaataattacccactaaagcagggtgctttagctcaaataccggggtcacttgctgaggactcatacctacattcatcagttgcgatgttagggtgagtgacgagccaatcagcaagtcatgcttaccttgcttaaacatctttagctcttcaaacttttttgaataggttaaaaactgctggccctcagtaagattaaaatcagcaagaactgtttgataaacatcaccacgcgatacgccaatagtatagttttgcaacgactttgtactacttactttaatgtcgttacgctcatttaaacgatataaacatgagtgccctgacaccaatggcccaacccaataaaattgtttttctcgttttgcggtacgcgatgttgaatatattcctgtatgcggttggctcattgtcagtgacatgcctcgcttccaaggcaatacattgaacgtacaatttagcttggctttttcgcacaaagattccatgattttggtgttaataccggtcagttggttgtgctgcataaagttgtaaggaggaaacacttcggtatataaagtcagttgttccgtgctagccactgcagtgctgactgtgaataaactaaaaagtgttaaatgcttatacatcgctcttaactcattaatcaggtttaacaattcggctcagctgcttttgcaatgtatttaaacaaaaaggtttaataataaagccgttaactcttgcggtaatcatctcattgacggtttgcttactgtcttcgcatgtcaccattagtactggcaagttagcaagcgtgggcgtttctctgatatggttcagcaaacatctgccatccattttaggcatatgcaaatcagtgattactagatcaaaggtttgcttctctagtaagtcaaatgcttgtgcaccatccgttgcctcagttatgtcattataatcaagcctacgtaacatgtttatcaacacgtgacgcataaggggcatatcatctacaaccaatattttcattaagtgaactattaaagttttggttttttaagcttagtttgctaacccaataacgcaataaagtagcagctaagagacaacatcagcgaccaattgacttaagcgcgcaattttaatgttgctcaattggcgatagtcaaaataagggcaaacaatcactttactagacttgctaattgcaaactcatcatcaagccaagttaattggcaatgcaaaagtccgttattaataagctgcttagcataagttcgaccagcaatgatgtgtaactgctttgatttgtttaatatcggcgggctgaacagtaacgtggtttggctatgtgcttgcagcagttgttcatcacgaaaagtttgccaatcaggcgcctttttagcgaaatcataaaactcgcttggtagggcaaacagcactttgctgtatacattaaaaactttacgccaaccattaccacaagcttggtttatttcgttaatctgacctgtttgcatcgcatgcaaatgatcaagctgttgccatgcaggcatcggcgggcgcttttcaatataaacagcgactttaaacgcctcatcaccaaacccctgtagtgatgcactattaacttcactcatggctttttagctaggatccgatctaggttatttgcaaagttttgacggtcagcttggcttaatggcggcgggccaccggccatttcaacaccactcgaacgcattgtttccataaagtcgcgaacattcaaacgggagcgaatattttcggttgtatataattcaccgcgagggttaagcgcttgtgcgcctttttcaataacttcagcagctagaggaatatcaccagtaattaccaaatcattcggctcgatacgtttaacgatttcgttgtcagcaatatcaaaacccgaagaaacttgtaaacggctaataaacttagaaggaggtactcgcatcgcgtgattcgcaaccaatgtggtaaacgtttgcgtacgctcagcagcgcgaaaaagtatctctttgataacaacgggacaggcatctgcatcaacccaaatcttcatggtattctcaatataactattctagactggcatagtttacctcacttgaacttaattaccgctattaacgtattaatttgtttatttaaaaggagtataagcgtgcaaaaatcattaaaacttttaggggttatatttattactgcgattatttcggcctgtactggcgtgccggatgacatcaaacccgtcgataattttgaactagaaaaatacacaggaacttggtacgaaattgcacgtctggatcactcatttgaaagaggcttagaaggtattactgctcaatactcgattaatcctgatggcactgtaaaagtcatcaataaaggctacagcgttgaagataaagcatggcagcaagcagaaggaaaggcgaagtttgcagagcagcaagacataggccacctcgaagtatcattctttgggccattttacagctcttacgtggtgtttgaattagacaaacaggactatcaatacgcttatatcacaggctacaacaaagactatttatggtttttgtcgcgtacacctactgtaacagaacagcaaatgcaggattttataaatacagctaaacagtatggcttcaaaacagatgaacttatctatgttgaccataaaaacctgtaaaggggctttacaactgtcttggaaatatcacgaatgtgcaacacaactgtaatggacattatgcaaactatgcatcgttaaattgaagcaacatgtgatcccccaatttaatcccctgcttgggtaggcaatgcctacccattttttttatatcatttcgattaattaaatattattgccggttgatatcagatcagcattttactaactagactataaaatcatcactgaaaagccacttaacagcaaaacagacatagttaatacactgacatacttcacccaagaaacggtaaaactgtataaaatcattagcataactacacttaatgccatataaccacaaaacagcagagcaccataaccaccatcattaagcacactaagcagcaaacttagtaaaatagtgatccagccactcatcaaaaagctatgccgctgtttttcggttaatttctttttaaacacatcacgaaaatgattgaactttgcaagtgcaaaacaattaaaccccaaaaagcagagactaaattgcagtaactccatcatccttgttgctcctttaacagcctgtttttatttgatttagccttatttatcacggttttatggctaggtatttttttgctttgtagtaaaaacagcagcccagcacaaataaacgcactatcgataccgaataaagcccactgtttagttagtaaatacgtgatccaattaccatcagtcgtcagtgcatttaccaccggcactaaaaagcaggctatggcattaagccatgcactatagcgccaatgatgtttttctcggccgctcacagcgataattagcatcgccagccaagctaagaaaaacacgagtatttctttatcggcacgctcagctaactctaaaggcaataaacggttagcaatgaaaaacgctgcggttgcaaaaggtaagcccatcagtgtggctaaatttagtgtctcaaccagcttcaagccaaagcttggttgttggtcaggtttttgcctctcacgaaggcgttttgcccacataatgcagcctgtagcaatcatggcacaaccagctacgccacagaaaaaatacaaccaacgcagtaaaggctccgctaagcgaccactatgcaatgcggtcattgagtcataaaactgcgctgaagcgctccaatcctcaccagaacttgcttctagttcacctgttacaccattgaataagtagcgcggtccgttatctacaacatctttaccggttgctaaataaaccactatttgcgaggtcgctgtattggcatttcttacaaacacatagctaatgtcggcatttggtgacttagtataaatctgatctaacacgtcgttaattgcaatcaaggggcgctgctcttcactaggctttgcacgtttgttgatgggtaaagcttcttcaaacatttgcttcaagccatcttcatatacagtttcagcagggtaggggaacaacataaatatgagagtgataatccccgtataagtgatcataatatgaaatggcagtgccagtactgacgaaacattatgtgcatcaagccaactacggctacctttgtttgctctaaaactaaacatatctttaaagatacgcttatggatcacgatgccagtaaccagtgctatcagcataaataatgaggctaaacaaacaattatacgtgcagtaaatacatcgatgtaatgtaaatcaaagtgcaagcgataaaaaaagttgcctccttttgtatcgcgaggcgctggcaattgctctaaggtatttgggtctaaatgcgtatagttaaaaggcgctcggcgctggcctggctgtttaggctcagcatacccatagcttaaaataggattacgcggctcaggtaagtttattcgccaagataatgaattaggtgcctgatgttgtaattgtgcaaacacataattaatttgctcggcttgagactgaacacgttgcacttggtgctttacatgatgcgtttctggctcagcccaaatagtaatttcatctttgaaaaagctgatagtgcctgcaaaaaatatcaagaataataaccagcataccaataagcccacccaggtatgaagccatgtcatggagcggaaaaaactctctttcatagccatcccttaataaatgaaagggccagcaattgcccactagtagttagtaaaatagtgatccaaacagtcttcaaagacttaacggcaaacacccaaataaacacgcaacagtaaaaaaataccgaaagagtcgtggtcaacagcacgctgtcgagtttattaagaggtagtaacacagctaataatgaaataagtacactggtaaaagcgtaaccccccatgatggctgcaacaaaacgcaaaaacacagcgacacgataagagaggctcacagagcgctttttagctgtatttttagggcgattgcctgccattgcatctaatgattgagaatgcatgataatcccttagaaaataacacaagaagaaaaacccgtattatatcgccagcaaacagaaaagatagtagttatcatttgcataaacgtattaaataatgaaacagaaccaactaagtcgttatgttagtaaaataatgatctgctagctttgttctgtgcaatatcatatggtgttaagtaaatacaaagggagttgcaatgaaaacgataggcttaatcggaggcatgagttgggagtctacacaaagttactaccagcttttaaatcaaggcattaaaaataaactgggggggctgcacagtgccaagatagtgcttgtcagtctcgattttgccagcatagcagcgctacaacagcaacaagattggccacaaatggccgagatactcattaaagcagccaaacaagttgaagctgcgggcgcggattatttattaatttgtaccaatacaatgcataaactagctgagcaagtacaagcagccgttgcaattcctttgttacacatcgccgatgcagttggtgaaaacctgatccaacataacttcaaaaaagtggctttgttgggtacccagttcactatggaacaagacttttacaaacagcgtttagcagataaattcgcaatagacgtgttaatccctgatgttcaggggcgtgaaacagtgcaccgcatcatttatgatgaactatgtaaaggcataatcaagccagaatccaaagctgagtatttaactattattgataagctaactcagcaaggtgcagaagcggttattcttggctgcacagaaataggattactagtacaacaatccgatacctcaataccattatttgatagtacagcagttcattgcgctatggcgcttgagaatagtttaaaataggagcagattatgtcgaaccaccatagcttaaattatgttgaatttgccgccaaagatttagctgcaacaaaagcattttttcatcaggtttttaaatggcaatttaccgattatggcgctgagtacacggcttttagcgctgaatctgcgggtcttgatggcggtttttatcaagcgccattaactagcttaaccagtaatggtggcgcgctactagtgctttattcaaataatattaaagacactcaagcgcaggtagaaaaacatggtggcacgattattaaacccttgtttgattttcctggaggctgtcgttttcacttcatagagccaagtggtaatgagttagctgtttggtcaaaacaagcatagatcatatttttactaactgatgagtactcaatcgttattacaacaagttagtaaatgcgtgatctgtgaaccacatttaccacttggggcacgccctgttattcaatttaacccacaagctcgcattttaattgccggtcaagccccggggattaaagtacatgaaagtggcaaaccattcgatgatgcaagtggccaaaggcttcgctcttggcttggtgtaacgagcgatgagttttacgatgactgcaattttgctattttaccgatgggcttttgctacccaggcaaaggcaagtctggcgatttaccgccaagaaaagagtgcgctgtagcatggcgcgaaaaacttttagcgcagctcaataatattgagctcaccattatcttaggtaaatacgcgcaggcatatcatttgcctcacactaagcagctacccttaactgagttagtaaaatcgtggcgtgaatattggccaagttacttgccactgccccacccaagccctcgcaataatatctggctgaagaaaaatccgtggtttgagcaacaagtattgcctgagcttggtagtaaaatacgtacaattttagcaaggtaaaaaatgaaaaataccttttttgctgaacacggctattaccatgtaaaggccctttacacagaaagtgagcttagcaaagtaaggcctattctcgataaatttcatcatcattggttgcaagaaaaccaaggcttttaccaatccaaagggattaatagctcaggattgactggcgctgcatgtttaagtactgatgaaaagggtactctttttgaatttatctgtgccgatacattattagaacaggttaaaggcattgttgctgttcctcagtttatgaatactcaattattctttaatccttacaaccccaaacaagcaaactattggcatcgcgatatgcaatatcacttagagcttgaagcgcaaaaggcagcactttgcggccctgaagtattgcattgccgcgttgcttttgaagatgaactgggcatagagctaataccggctagtcataaaaattgggattcagatgaagagttagcagttagattagagcagcagggtgttcgcaatagtgactcattgactcgcggtaaacgtgtagaactcaaaaaaggtgacttacttatattttcggcaaatatgatccatcgtggcttatatggcatgaatcgttttgcccttgatattatttactttgagcgtcacccaagtcttaatgagtttgtacaaactggatttttaccaactgcagaacaaaagcagcaattaaaaaacgcgatggtatttgagtaagcaaaaaaaagcggctacttagccgctttctttatttcattgtgctgttactgcaacattgcaaacaattcttttaactgcggcatgtattgcttaactaagttaacgttactttcgcttacatccactgttgcagtacttgctttaacaccttctaaagcacccaccattgagcgagtccccgcatctgatgatgatgccgttaagctctgtaaaccactcattgcttgatttacacgttgcttgttctcttctgacattcccgctttaaggttttctaaatacgccattgatacctctgagccaacagtaactaactgttctggcgtaaacccgtattgcttggttaacgcttcaaactcagtataaagctcatgctctttaatgtgacctaacgcattcataacggacgagctatctgcacttcctagcataccacttaggtcaacagtattcagttctggctggttttgtgaccagttaactacagcaggtaatgctttaatgtaacgctgtaattggttctcagttatatcttcagcgagacttgaaaaactcattgcaagtaaactgattgaaaaaagtagggctttcatgtggatctcctttcgttcatatttgtcgcaactagcatgaatcaaagggcaattatactcagctaattacaaatgttacacttgcatttttatcacagctaactgaacctgatgttaattatttctaatactgtcactatcgatgaatgggagctcgactttagcgcaattcgctcacagggtgcgggcggacaaaatgtcaataaggttgccagtgctattcatttacggtttgatataaaacgctctaagctacctgacttttataaacaacgtttacttaatttaaatgactctcgaatcaccaaagaaggcgttatagtcattaagtcgcaaacacatcgaactcaagaattaaataaagaagacgcacttaatcgattaaaagaattgatcatcagtgctactcaagtacaaaaaaagcgaagggctacaaaacccaccaaaagttctcagcggaaacgcatggatagcaaaacaaaaaggggacaaacaaaagcattaaggaaaaacatcgatatataactttattgttaacaggccgctcaaaaagcaaacaaaactgtaaagaagtgtaacgtgttaacaaagttaattgatggttaactccactaatactataatattcatactatctcacttatttgcaaggagccgctgatgggtctcaaaacacacattgttgcgtcgttaatgataacgctgtcagcgctgccaatcaccagccacgctgttgattcttggcaagccggaagcgcttacccgcaaggaagtgaaacttgctacaatgaaattctttacaaagctagatggtgggcaacgccaggtgaagagccaggtagttcacaatggggggcatgggtcgctgatgtcgcttcaaaaacatgtgtagagagcgtcgttaacaaacaagaaaacctactaaaatcgttaccgactattattgaaaataatcagaaaaaagagagctccaattagctctcttttttaatgatttactagtcaaatgtatggtgacgagttacttcaaaacgattaagtaagtgatgcattacatagaccgcacaaagacttactaaaattgccactgacaccgacgaaaatcgatataacgcgctgtataccagatcttggcccggccctaatgattgaccaaacaaaatgccaaatgtggtgataataccaaaaccaacacccggaataccgccagcaataatgtgataacgactaaaaataaaagtcaaaatccataaaattaacgccggaaatatcaaaatatcggtatggttatacaaaaataactgtgccactaacgctaagttacatccaatcaatgtacctatcgcacgttgccatgcagccatacctgccgctttccagcataacgaaaacaaaatcagtaccgacgctgcttgagctgagattgaatcttgtaagtcaaatacctgaaatacaacaaatgacaaggttgctacggttgaacaaagtaatacttcatgacgcacactttcttttgctttttctggcataacccgaccttggcgtggtgcaacatcaggaaataaaccatgcattagcatcgagaacaccacagtaaccacaacagcaacggcattgctaatgatcaacggataaatacttaccccaccaccggtgtaggtcgaaaaatgcaattgaatagacaaactcaccaccgttgtggcaccaaataaaaagttagcaccacggctcatttgataaaacaaaaaagcaaatgcgataaagctcatcatcgtcataacaacaggcaggtgtgcaaatagaccttgcacaactagaacaaacagtgcactaaacaccgcgcctgcgtaaaactgacgaataatatgcatgttaagcacaggcactaagccgagcaataacatagggtaaactgtaaaaaagatgccattaggccagttcatcaattttgccagtgcaaaccctaatgctgagcccgtggcaatgcgaagcgcttggcgcaaaccattaccatcgagttgcaatactgacataacttaccctgccttagtaaataaagtgcagaacactgatgaagcgaatttgcatgctcgcaaaccagctgcctatgcttgagtcaggcaaaagctgaacagttgcacgcgcaccacttggaaatttagctaacatctggtgttcatctagttggatatgaatacgttggcgctgtgcatcacgtacccaacgattactactttcagtagcactgagcaaaccgtttgcattaagctgaccatcactcacacctgcttcaaagctaataattttgcccgtaaacactttgcccggtagcgcatcaaagcttacttttgcagtgctaccaatttctacatgaaccaaagacttttcacgaaaatctgccactaaatcagctttattagcaacaatcgccattagcggctggcccttatttgcataggtacccggtgttacttgtaggttggctgttttaccgtcggtatcggctgtcactgtagtatacgacaggtttagtttcgcttgctcaagctggttttgagcatggcgaagcgctaaattgtcatcacctattttaccgcgtgctaatttggcctcgctaagctgggcttcaattgcagctacattggctttgcttgattgatagttcgcattgattgtttcgtactcttgctctgaaatagagcgctttttcaataacgactcaccgcgctcaaataaaagcgtttgttcatgcagttttgcctgtgcagccgcaagctgagcttctattgccttgacactgctatctaaacgttggttttgtagtttcgcatcatcataagcgagttctgcctgctgaacggcaagcttaaaaggctcgtcgttaatcttaaacaaggcttgctgcttttcaactgcttgattgttggtgactaatacgtcagtcacgcgcccacttacttgcggggtcacttgcacaacagggtgataaacacgggcctgcggtgtgacaggcatgtacagatcagcaatcacaaaatataaaaataaaacaataaaacccgctaaagagatttttacgtaacgggcaaatttttggtccggtgtcataaggttacttatctcctgaataatgacggatacactgacgagcattttgctccatctgaattaaaccatgcgccatcgtatcgagttgctctgtggttaagtcagcataaaggtgctctttcacatcagcgataatcacctgtaatgtgtctaacaattgtagaccttgctgtgtgaagtacagacgtttactgcgtttatcgtctgcatcagctttacgagcaataatctcttgttgctcaagctgcttaatagtgcgagttaacgatggcatttcaatgcccaagctatttgccaactcttgttgggtgcaaccttggtttagatgaaacaggtgcatcatcgcggtccaacgagattgagtaagccccaaaggctcgaccgccaaggtgacagcatcgcgacataaacgatgcacacggcccatactgccgcacagtgttaaatcaagagtttcgtgaaaagggggagtggaagacataatgtgctccatttacttagcatgctaactattttaatgtagttagcatgctaagtaaatgttgatgcaattaataaaacagatagctatgttcgataaaagcgaacagccgtaaaagttatgcgaagaacaatactattttgcaattaactctttgatatggctttcatagaggtctaatttatcagctacaaaccctgtgtgttggaaccgtactaagccctctttatcgattaaaaagctgctcggcatccctttaagttggtattgtctgccaataacagcatcagggtcgtaaataatagtaaagttcactgcaaactcagctaaaaacgcatcggcatcactgcgctcaacatcaatatttacagcaactactttaagcccttgctgttgatacttgttctgcatcgctataaaccagggaaacgaccgtcgacatggactacaccaagatgcccaaaaatcgagtaacacaactttccctttatattggctcagtagtttagacaattgctgctgacttgcagttaaaggagcagtagaagattgctctgccatagcagcagagcccgttaataaaagaagtgcaattaagatgtgtttgatcattgataatttaacaagttcgcaggtgaatattggtcagtgagtaccttggtatccgcgggccaatcttgattacccttagtataaaacaaatgttcacgcagtaactgcaaatcaacatcgtaaggggttaacttatttgcgagtttattggcgcgctcggctaattgttgctggctaggcatagtctcgaagcctgccaaaataatgcgattagagttttcatcggtcacaacattaacaaagtcaccaaacacatcaaagtaagttgccgactcatgctggtacaatttactcgatgaaaaagtatttgctgcaacaatgccgccatcagccagtatactttttacttctgcaaaaaattccttagtgagaaggtgctcagggatataatcgccattaaaggcatcaagaattatccaatcgtacttttgctttttcagtgcagcgcgtttgataaaaatacgcccatcttgcactttagatgtcacattatcggtttctacaaaactaaaataatcacgggcgacttttattactgcagggtcaatttcgacattttcgatactcgcttcaggataaagctcatgtatagtattagagagtgagccacctcccaaaccaatgatcaatacattttgcgggttatcaataaatagtaggcttgcaaaggtcattttggtgtaattaaacaccagctttttaggcttactttcatacatacaactttgcgtacttttacgagttttttcgttgaattttaaacacagtaagtcgccagacttctcaactaagatattgcgataaagcgagcgctctttatggattacttcagccaacccgctaaagggcagcgctatgagcaaacaaggtattaagactctaaacatacagtacgctcctttgtttttatttgactaacagctattgcaagcaaaccaagcgcgcctaataccgctgcaaaggttttaataatgtcgttaacatcaaaagctagcaccatataaaaagaggtaataatcgtgccaagagcgcttcctagggtgctcacaaaatacaaaccaccggcaacctgaccacttttttcatgatcggtaaccaataatcgcactgaataaggagagatcatgcccaatattgttgtagggataaaaaacaacgccgttgatgccagtaacgagccataacggctgtcttcaacatgagtgaaaataaaggtcataattggctcggcaaatagtacaatcggcaccaccataatgctcgcaacaaagaaaataagaccgtatttagttaacgaaggattgcgagtagagagcttgccgccaagcaaataaccgattgataagctcagcataaatacagtgataatactgccccatatatgcacactactaccaaagtaaggcgctaaaattcgcccgcctaaaagctcaattcccataatacaaaagccgctactaaaggctaaaaagtagataagcgcattgattttattcattaaacacccgctgattttgttgttattttacccatcttaacctgatgcagttaaggatgccatgactgttttttaagctgtaaaggccgtttacaaaatgatagctaatgaaataaatagtaaaaaaggctaggttaaagcacatatgctctggtattttaacgggaacaaataagcaaggataaatgcaatggatcagcaagtaacacacatcaatatcgacaacccaacgaccttatttggcctcaaagttcgcactagcaatataaacgaattgagcggtgaaggtgccaaaattgcaggcttatggcagcagttttacacagacatatcgcccaaattagcgccatctagccaagtttatggcgtgtacactcattatgaatcagatgtcacaggggagtttgatgtatttgcgtgtactgacctgcaagtcactttgccagagatagaacaaacgacactcgccacaggtaactatcttcgctttagtggcaaaggagcaatgccacaaaccgttatcgatgtttggggtcaagtttggcagtactttagtaatgaacagtgcccgcatattcgagcatataaaactgactttgagttttataaaagcagtgaagaagttgaagtattcatttcggttgaataacactaaaccctatttttagtgtaaagccccattacaaaataaagccgcttattgcggctttgttgtatctattaattggcgtatctcagcgctaattgttctgctttagcataggcattagtcaaagagcgttggtgtctttggtcgttaaattcttgatactcacaggctatttcatcaatatgctgaacacctaaatacttactcaaggttttaatgtgcggcactaaatggctcatactctcgcgtataccaccggcctcaaagccaaactcacccgttgaggttataaccagcaaacgtttaccagttaacaagggttgcaaagggaaatctccccgctgcaagtcaaaatcaaacattttattgatcctaacgatttgatcaaaccatgcttttaattgcgcaggcatgccatagttatacataggcgttgatatcactatggtatcagccttaatcaactcatttatcaattcatcagattcggccagtacttctttttgctctagcgttaacttgttggctggcgtaaacacagcagcaatccaggattggctaataaatgaaggtggattaatcccaacatcacggtaaatatactcagctatagcattgtttttctgtaaatgatttacaaattgcttagcaatatttttagagattgagtcgtggttaggatttgcatttttagctgaacgcacactagcatcaatgtgtagcagagtagtcatagtaaatacctcattagttaatgtgttggtatcatcattaaatgagggccatttaacaaacgagttataattcactataagtaagttatactcatctataaatttagacgggttcaactatgcatatatcattacaagctttaaaagcctttgagtcagctgcgcgattaggtagctttaaagcagccgccgctgagcttgcgattacgcctacagcggtatcacaccacattgctaatctagaaagccgcttaaatactgacttatttcatcgcgaagtgagaaagattaccttaactccatcaggcgagtacctaagccaaaacacaactagcggctttaagcttatttttgcggcaattgaacaattgagccaagcacataaccaagtacgcatcaccacaacatcatctctagcagccctaagattaatacccgctttagaagagctaaataacgaaaaaccgcatttacagcttgatatatcaaccagtgaaactttagataagcaactgcataccttgcctgttcggctaggaaatagtgaggaagtaaacaaagcagatatcatcaaatatgagcgctttgatatgtttgcggcaaacgcgcaacaaagcgccccttggcttgataaacaggttactttatacaccagccaatggaaaaataatgccctaccagccccaccattaatgcaatggctcaaagtaaataacctaagtgattcatgtttcaaggtaaacacattcgatcaagaactgtttggtataaatcaggtgctcgccaataaaggcgtggttttttgctcaaaaaccttagtgcaaccttacctagatgcagggttactaacatcgtttaatagccaagatgttgaatcaaaactgtgttactacattcccgaaaaatctcgcttcgaaacagcaacacataacgttgtgattgaatggcttgagcggttactgaattaatgatgtacaaataaccatcatttaagttactgtggttttgtaacttttagtcaccaataaggatgttgttgtgtataaattactcttatctacctgcttatctctcgctgttttttctactagcgcagcgaaaattatcgacaatgaacgcgtcacaaaagaaacagactgcttcacaggcatctttgctgactatgattcgtggcaccaatttatagcgcaaaagaataaacgcaaagctaaaaacgaagaagcatacttaaagcgcataaaagcctttgaagaaatctttccacgaagtatgttcgataactttaaagcgaatttaacctgccatatttttaaatatcaggtcgataatgttgaggtgcttggatatatcatcaaacctaaagtcaccaagaataagctcccagtattaatttataaccgcggcggtaacggtaattttggcaatgtttattttgctgcaatgatgcgcaatttatttcctttagcagagcaaggctttgtggttatcggcagccaataccgcggtacattaactaaaaatgatgatttagatgagtttggtggcaaagatgtgaacgacgtacttgcgcttattgattttattcctcacatagcaagtgcagatgaaaaccgtattggtatgctaggagtgagtagaggcggcatgcaaacccaccttacgatgcaacacacaaacaagattaaagccattgcaaccattgctgggccgaccgatttagtcaaagagcttacgtttagacctaacatggaaaaaaacgtgtatgtgcgccgtatccccaattataaagagaacaaacaagcagagcttgaagcacgctctgttatgaactgggttgataagctatcgcctaaagtgcccatattacttattcatggcagtgacgataaacgagtatcggtcgagaactcaattcaatttgccaaagcgctagataagcatcaaataccccataaactcgtggtgtatgacggtgacaaccactttttaatgaaccataaagaacaactggaaacagagctagttgattggtttaacacctatttgtaactttgttttaaaagtaaaaagggccaaataaggcccttttcattacacacttcgctcgataatccaatagctcgcagccgccattgccaacactgataatgtaattcgaatagcactataaaaataagttctggcaagcattgctagcacgggtacaacgcaaataacgattagcaactgcacagtttcaatacccagattaaatgccaccaatgcgacgataatggcctgagtatcaaaccccatatggctcatttcaatcgcgaatgcttgaccatggataagcccaaaaataaatgctatccacatagctgactgcgaaaaaatcggcctaattgcatttaacgccgaaactaaaatagacgccgcaaccaaaatctcaattggctttgcaggaaatgaaatatatccgagcgtcgtcagagctagcgttaatgagtgtccgagtgtaaagaaggtgacaattttagctaccgacataacacattggcgcacaggcgccactgattgccagcgcttattggcactaactagaggagcgggcaaaattaaacagagtaaaaatagcaagtgatctataccggctgcaatatggctcataccatttacaaacatcagcttaaactgagaccatgcagtgattttttcaggctctataaataaggtttcgcgctgatagcggatcagccctatggttgctatgtcttgacttgctttaagtacttcatgcatatcgttgcgatacgaaacataaattttgtgagtaacaactcggtgtaaaatggcattgtaatgcaaagaaaaaccactggtatcaaaattatctggtttgataaattgcatcttcattaccataaacagtacgttatcaaattcatggatagcaaaatcatcaaccttttgtgctgttaacggctgagaattttgtgttgtgatacttacatgtgtttgcatgtagtcttgtaaagccgagaaattaacctgctttaggtcatcactttgtgaaggaaataggctttcatcagctaaacgtaattgatcgaggggtaaataaatttcgagttcaatctgtggtttatgcgtatcaataaacacagaactcgttgaagcagaatgggcaaaggctttggcacaaaagaggctgaccaaaaaggtcagcccaaataggagattaattactgctttcatggtttataaattattaccataatcccagctcttatccctgaatattgtgtggtaatgagtttcaccactgataataatcccattttgacacgccacctcaatccaaaggttagggccatcaatacgcatataagtcccggcaacatccacatcaacaccagccgattcagtgccagcccaggcaatgtaggtatctgcataagcagaactcgttacatagcttagcgttaaattttcaaccacttcttcagggtagtcgttgatccactgctcgattgctgctgtaaccagtgcttgttgatcctgcgttaaacttgaaacaaggatccctttgcgattatcccctgtagggtaatcagttggtaacgtaccactcccgttatctgggcctactaatacatctgaatagctttcaccgcttaagtaagcctcagcaagctcagattcacttaacgagtcaaacatagcaacgagggcatcaccttcatccgcaagcggggcatagcttgccgagtctagttcaaagctgactttaggttcagtaccaatatggtttggcacagggtaaccatcgccatttaagtaagtaatgttataagctaagtggtgaccacctaactgcaacatccagtcgccgctcacatctgggtcgccaaaaaacgctagataatatttaccagatgagtaagcagaaccaccacctaactcattcaaatagtcatccgcagcaataacacctaagaaatcttggtagccatcatcactcagtgccgctttcgcaaccatcatcgccgcttcaagtgattcatcgtctaatgccccaagttcaataccattacgacttacattgcccgtcggtaagtttgaccacacagttcttgcttcagagtctgaataatcaagctgtaaatcggcaagttcatcttcatctaatgtgtcgattaatgcatttgcagcacacacgagtgactctaggctggtatcgagctcacagtcacctagactgatatcgctgaagtcactgacactaattgaacctgagctacttgaagagccactgttgtcactaccactgttgtcagtaccgctgttatcagtaccactgctatcgctagtcgatgtatctgtatctgatgacgacgatgagtcactgtcaccacaggccgctaagtttgccaataacgcaagcactgccagtgattgccatacctttttacttaatttcataaccaaattccctacatgaattattgcttaaaaaattaccatagaggcaaggttgaaaagtgtagaaaatatgtagatcaccaaatgaattatggaattttattcacgaaacaagcctatttagtgaaggtcaaaaagtaacttcgcactttaaaattaggtatacgtcatcagcaatttcggttatctgcttagctttatcactcagagctactcacccaatttataattaacaacagcgctaagacagcagaaacaagttgccaaaagagcacgggattacgttcaagtagtggcagctttctattatatgctggatttgggttatgcatatcaaacaaaaactcagatatactttgatagcgtttttgcatatcaggtttacaggctttgttgattgcggcatcaacccatactgggatctgtaaattattatgcagcaaagatttatattggagtcgatgtagctctttcagattagacactttagcaactgaagtatcataaggataggttccgctgagtgcatgataagtcatcacagctaatgcaaacatatcactgctcagttcgggccaataccccaaaaagtattctggtgcgctatataacatgtcacccggtatgcgcaacacatcatcactgttactaaattgcaggccatgtaaactggctgagcctaaatccaataaggttaaattgtcgtgttgatcaatcatgatattttcgggccgaatatcttgatgcaaaatacctttgctatgcaatgcgcctaacgctgagacaagttgcgttagccatgctcttacttgctgtaaatttgcattaccattatcgtttaaccattgccttaacgttattccttgcactcgctctgtcagtgtgtaaaagacatgccgtgtagtctcagagtgccctcttttaacaatgcgtgggtggtcaactttggcaattaaccactcttcttttgctagctcatctaagtaatacaactcagtttgcaaggataaagagggaactttcatcaccgcagtggcaccagtgatcgtgttgtgaacttcaaataaagaacttctgtcgcttttgtgaagctgattaataagtttaaaattatcaacgacatcaccgacactcaaggcatcaggcaaaggtaaaaaaccatcagaagtgtattcaaccgtttctctgggatcggcggcacgttttttaatcgcgacaatactcaggttgtcatcgcttgcgttagccaaagcaagttcagcagccttttgacatgcatgttgcaattgctgttcactctcacaattggcaaataagcccaataattgctcagttgatacaaactcagtaataccatccgtagccaaaataaagcaatcacctatgactaggtcgatttgctgaacatctaactgtaagtttgaacgtatacccaatgcattacttaaatattgctgcccatattcatcagctgcgcgatgctgttggctaaaatggcaaatcttactgtttctaattctgaaaatacttgaatcgccacaattaaataaattggctttcttattggctaaaattacccctgcgaaagtgcagacaaacccttgatcaaagttatcttgatattggctatgttgggtttttgccagtaattgaaggttaatcacttcaagtacttttgtgccagctctggctgcagaccatacatcactggtacgtaaatattcatcacagaaaagcatcacagccaagtcacttgcatgctgactgacttggctgctacttatgccgtctgcaacagcagctacagccccttttgagcgagactctgttaatgcggggatagtgcatttaacactatcctgattaaccgctttgttcccgcgagatgtataaaaccctgctattacatcggctgtcatagttaatgcgtctttgttgtttttgtacattgattgcattaattacttagcaattacattgtcaccaataggtgctgcagttgtcgctaacttgcgctttggttttgtacgatagtgcgttgtgtacaaagtaagcccagtaaatgctagaccacctaccaagtttccaagcgcagttggaatttcattccaaattaaataatcaacaacagagaaatcaccacccatgatcaagctaaatgggaacaaaaacatgtttacaaccgaatgttcaaacgccataaaaaagaacagcataataggcatccacatagcaatcactttaccgctaacatgtgttgacaccatagcacccacaacacccatagataccatccagttacatagcatgccacggatgaaaatggtcatccatccttcaaaaccgtatttagcataacctaatgtacgcgcttcaccgatactagcaaccttagctgcaatagccccaccatcggtattaaagcccatggtaaatacaaacgccatcatgacagcaacagtcagagcgccagcaaagttgccaacaaaaactaatccccagtttcgcaaaatttgtggccaagtaacgcctggccgacgagcaagccaagctaatggtgttaacatgaacacaccggttaatagatcaaaccccattaaataaagcatacaaaagcctacagggaacagtaccgcgccgagcagaaatacaccggtttgcactgcaactgtgatcgcaaatacagcagctaaggctaaaatagctccagccatataagcacgaattagcgtatctcgcgtggacatatatatttttgattcgcccgcatccaccatttttgtaacgaagtcacttggtaataaataagccatgttattcacctttcattgttaatctttaatctgtttcacagttaaaatgaccatctttcaggcaaaaaaaaacgcccgcaccgactcttacttttaagagcaggttgcggacgccattgtcctttgcatttccaattgtcacagcctattcaactgttcataatttattaaacaagttatatgccaaaaataaccaaaaaataaaactaaatcctttcaatagtttaactttttcacttttgctttcaccaaatcaaaagttaacatttgctttactttggagcgtggcacgcatcactttggggcgaatcagtaaacgaaataaagaaggggcttgcgaaattgaaccataaaacttgtgatctgatttttaaatctctctgtaaaccccatttacagtggcacaacgcagataatattcgagcaaaactgattttaccttgcttaaaaatgactattaatttttagggaataataattgcttgatggtatctattcaatattagtaataagaacctatgccgacatcttcaacctgtaccaaacgctttttactcgcagcaaaatatgccgagctgaatagcctaaaggcgttagcttcaaactgtaaaatagttatagctgcgacacagatgatccatcagctgcaaagagagcgcggaacaacgaatgtttatctagggtcaaaaggtgtcgcctataaaacaaatttacctgtgcaatttaagaatagctcagaggcagaggagcaactactcgatttacttatttcaaagttcttaaatagtgattcaattcacacccaaacaagactattaacgtcaattactttagcttctcaaggtcttgaacagctaccaaagttaagaaagcaaattcaaaaactacagattacacctttaaaatctaccgatgcgtattgccgattaattagtaaaatcataaacctaatatttgaagcagcagatgtatcaagtgatgcgtcaataaccaaacttttagttgcactgtttaacttcattcaaggtaaagagcttgcagggcaagagcgtgctttaggagccattgggttttcgcaacaaaaacatgagccaaaaatattatcgaaaatgcatgaacttgaaagcgcacaacacgacgtatttgagcggtttttagagttttcggttagccaagaacaagcagcctggcaagcgatacaactctctgaactaactaatgacattaataaactcagagcaatgttcaaagcggtgtccgcatcaaatagctacacacccgagcttggtgaagtctggtatgaagttgcaactaaacgaatagatgcccttcaaaatatcgaaactatgctgactactaggctaatggagcaagttcaagtaaggattaaagaagctgaagcgaaaatatctaatcacaaccttttaatggaaaaaatcagcgaaaacaatgagactgatccgggttttaacatgctctttgaccgtcgcttttcagggctgcatggcgtagaaataaatgctgatgagcagcaacatgatgttcaatctgggcataaatcgttttatgatttaatttgtgaacaagcaaaccatattaaccaaatgagtgaagaactagaaaatgtaaaacgcgcattgcatgagcaaaaggtgataggcagagcaaaaatgttattaatgcaaagctctaatgtgggtgagcatcaagcccatcaactgctccaaaaagcggcaatgtcacaaaaccaatcattaatagacgttgcaaacagcattgttgccaaagtttcaaaagcttagcaacaaatagtcgcaccaaaaagatagcaagcgtttaattaacctcagatgctattagttaacttaaccatttagataagcaaattaactaaagccaaagaacgaacaaaggggtagttcaaactcgtttttggacaaatgtgagttacgcgtaatctggtaagccgctaatatcagactagtaaaagtatcttgaaaccttaaatacttgttagcagcgttttccaagtatacgctttgccctttctaacacatgatcaaacgtcataatagtcaagttgtggtaactactatttaaaactcgaaatgcctgctgctgctctcggttccagtcatttgagcgaccatatattaacgtacatcgcggcttaatcgttttcacataaccaaccctttccatgaatttgacactgtttgcctctagctcgatttcatgtatgtaagactgggattgtgtgatcgccttaattaaatcagagtgcgggtaataattattatgatcaagacctgaagcccagaactttaaaccgccctctggtcgtttgatttcaacaatatcgaggaagccgtcataactttccattagaaagtctgaaatgttatgagtatctattgctctttcatctaacactttgacaaagtcgctacctagaacccaactattggtttcaaaccagttttgccatacgttttcagtaaagtcagactctagtaaatattgaaattcatctattgcacgagattttcgtgcatgctctaagcctagttctaattcttccggtattacgtctttgtccaatagaaactgaagcatcccttgcttgtctggtaaatttaaaagttgtttgatttgctctgcatttgatgtgtcgtacgggttatctaaaggtaaaaaagctttcgtaccctgtctgaaaggctcgtaattggttgaaataaaatctataagattactgaactcttcactatcgagagtgagttcacttttgggtttatctaattctagtgtttcaccctcaagccaaccctttggcttattataccgaccaagcttcaagaacacttcgtcttcagaagtgttatgagggattttccaaaatattgctcgggtcaatactctaggtttatcacgaataattttaactaatctatctttgatttttgtcatgatacctctttatctcctcatagctgctaacgctttctatacggcttttagccgcttttcatactcctatcatgcagtctttccaattacagttcaattgataatcaataggttaatgagaaggaatggatattagattgcaaaaagacgcatatttttaaaaagcttacgacgacactccctctgataactacaagtaagggaaactttcatccaaaagaaattaattaacttcagtgataacaaacaatggggcataaacgagttcacccttaatgaatgataaactcgtaggtacaaaggtcaggttcgtttgctatttaactctaacgtgaacctcacagaagacgctaacatcactatgaatgagcctattaaccctgttataaaaggcttacgcgccttttatttttaaacagctgggtgattgtgtttcttcgacaaagtaattcgcttgtaacaatgttaaatctacacgctgacggtagttaacaacatcacccacaatcactaaagctgggccaacaaagtcctttaagtctcgctcagcatcaatacttgctaaggttcggcaacagagttgttgatcagttaagctacctttatctaccacagcaattggcatatcagggctcattttatgtttaatcaactgtttagcaatactatcaacacgggttaagcccatataaaatactaatgtttgttttgatgcgactagctgtgaccaatttgcttgttgcgcgtcatctttacaatgcgcagtcacgaattgcacagcttgtgaacatcgtctgtcggtcagcgggatccccgtataagcagcacaagcactcgcggctgtcacgcctgggactattgcaaagggaatatcatgctctgctaatgcgtgtgtttcttccgacaatcgaccaaaaatagatgggtcgcccccttttaagcgaacaactgttttattttcaagtgctttagccaccaaaagttggcaaatttgcgcttgtgacatgctatggcagccttgtctcttgccaacaaaaataacctctacatgagcaggaaaatactgctgaatttcgctatttactaaccaatcaactaataccacatctgcgtgttgcagaattctatgcgccttgagtgtcagtagttcagggtcgccagaacctgcacctattaaataaacttgaccatttttcgaagcactgcgtttaaatggtttggtgtgcgtatttgaaatagctaatttcaatttatgcagccattcattttgtacatttaatacagttttaaatgcagtattggtgaagttaaccatttgagaaaccatcattattctcctagatgcatcgaaacgttgattacaacaacacttcaattttactgccattaatacgtgcgtcgtaaacaggtaaggtgatcgtgtcatcgtctaaacaacgaccatcattcagcacatatcgctgtttatagagaggcgatgcaacaaaaatttgctcatctgcgcagccaattaagccccgatacaacacattagcttttcctattggatcaaagtttcctagcgcatagacctgctttttctcgtttgcttcttgaacgtagaacagtgcgatttgttgctcttgtttgtgtgtatcactcaccaatgcacacacacctgaatccaatacaaggtcagttacttcacagatagtttgccagttttgattactattactcatatcgttttcctataccgtttcaagtttttcttcagctctcgcagggcggatctgaccccgttcttcaacaaattgaatgttgatatcctgtttgtcactattcacaaattgacggaagcgttttaaagatgcaggattctcgagggttgttttccactcacattgatacgtatcaacaacgcgtgccatctgctcttctagctcatcagcaatggctaactcatccgctatgaccacttttttaaggtagtctaagccaccttccatattttccatccacactgaggtacgttgcagacgatctgctgttttaacgtaaaacattaatatgcgatcgatgtatttaaccaaagtcgtactgtctaaatcggtagcaaacaaatcagcatgacgaggcttcatccctccattaccacaaacataaagattccagcccttttctgttgcgataacaccgatgtctttactttgtgcttcagcacattcgcgggtacagcctgaaacggcaaatttgattttatgtggggctcgaaggcctttatagcgattttctaagtcgatagccatggtgacactatcttgttgaccataacgacaccaggtgctgccaacacacgatttaacggttctgagggatttaccataggcatgcccagtttcaaggcccgcatcgataagttgctgccaaatgagtggtagctgatcaacacgcgcgccaaataaatcaatgcgttgaccacctgttatctttgtatatagaccaaattgtttagcgacttgaccaatcgcaataagcttatcagcggtaatttcacctcctggaacccttggaacaacagagtaagtgccgtctttttgcatattggcaaggaaggtgtcattggtgtcttgaagcgcgacatgctgcgggttaagcacatattcgttccaaactgaggccaaaatagaaccgacagctggcttacaaatttcacagcctttcccttttccgtactgcgctaataactcagtaaagcttttaatttcttgaaccttaataatatcgaaaagcgcttggcggctataagcaaagtgttcgcaaatatccgtgttgattaccactccacgcgcagcaagctcactatctacaacattctttaataagcttgcgcagccaccacaaccagaagctgctttagtgcatgatttaacagctgaaacagttgttgaaccggtgtcgattgcggcaataatatcgcccttggtcacattcaagcatgagcaaatagttgcggtttcgggaagggcatcagcgcctaaacttggtttctctcctgcagaaggaagaataagtgattcagggctttttggcagctcaatgccattaagcatatattgcaacaagctatcgtagtcagatgtatcgccaatgagtacagcgcccaacaatttagattcatcatgactaaccaccatttttttatacacaccaagcggctgattttcatatgtgtaagttaaacagccagaagttcgaccatgggcatcaccaatagaccccacatccactcccattaacttcaactttgtgctcatatctgcgccagtgaatcgctctgaagactcatcgcccgcaattatatggttcgccacaacccgagccatagtgtaaccaggcgcaacaagaccgaagatgaaattgttccaaagtgcgcactcaccaattgcatagatattttcaccgcttgtttggcataggtcattaacaacaatgcctccgcgttcaccaacctctaagccaaactctttggctaaattatcgtatgggcgaatacctgcggagaatagaataagatcggtttcaagcacttcgccatcactaaaacaaagctgatatcgacactcttttcccgcttttatttcttgtgttgcttttgatgtatgaacctgaaccccaagctgttcaattttatctttcagtaattttccgccgccagcatcaatttgcaccgccatcaactgaggggcaaactcaaccacatgcgtttctaagccaagctgctttaaggcattagcagcttcgagaccaagtaacccgccaccaattacaacccccactttactcaccttcgccgaggctgaaatggcatctaagtcatcgatggtacgataaacaagactatgctcttgatctttacccggaatagggggaacaaaaggatatgagcctgttgccagcactaatttgtcatagttataaacaacaccggcggcagttgtaacggtttgcagttcgcgattaatatgagtgacttttgcatctaaaaagaaattaatcccccattgctgataaaccatttcgctggtcatggctaaatcatctgcagtttttcctgcaaaatactcagataaatggacacggtcataagcaagtcggctttcaccactaagaacggttatttcaacggccttagcttcactatttaggttgtgtaattgctcaacaaagtgatgcccaaccatcccgttaccaacaacaactatttttttcggtgtagacataaaattttcctcaatcatttagcgtgcaaaacgttaaaattttgcacccacccatacccaaagcttatttgtatcgactttcgcaaacgcctcatcaccagccatataagcggcatacttcactccaaggctgtattgtttattaaatgatttgctataaacgacatcgaattcagaacctaaatcatcatctcctgcgagagattcatccgcagagtatgtgtggtaaacaaggctccatttaccgctgaatgcgttacccgataggctggcataaagatcttgcaaacccgcagcgggtgtcgctaaaaactgatcggcccagccattaaatttgtgtaaggttgccagaggagtttgaaaggcttgctcacccttatcagagcctagcgattcgtaaccaagcttgtaggtgatatcacgataagtaacactgctctcaaggagtaaatactgggtatcgtagctatttgcaccactgtcattactttgtagcgcatactctgcagaatacgaaacgggcagctcagcaacgttttttttgccaactaagcgaacaccataggtatctaaggagttatcagtgttattgtcgacctcgagtaagtagccataagctattaacttaccgaaatcggtttttaatgatgcattgaaaagatgatctttagagtcgagatctttttcatctgcgaagattctattgcgtttgtttatatatgcataactggcattaatagcgtctttttcatagcgcgcactaaaggcatcaaaggtttgtttatcttgacgccagccaacatgcccaacaaaacgatggttgtcgagagtaatgacttgtcggcctaacttggctgaaaattgctcggtattataggcaaggtaaagttggtcaatttccgttgattcaggatcggctactacagaatactctgtgccatcaccaattccattattataatcatcgataacagccagcgtattctcaagttcaatgaaagcagaaacccctgcgaacgttttagttttgaaattccctaaactgcgaagtgttagtgctgatgcatctttcaatgcattgtcttgatcaaccgactcatagcgtaagcgaaagtcagcattcaaagtacctaactcagtttcaacagctgcaaaagcttgatttgcagcgataagggttaaaattgacaacgtaactctagttaatttcatggtttattactcttattattcctagttgatttgcaagccgtcacatcagacgccaccttaaatttcccaaacaatattgaattgctcgccattcatgccatgcagaaatttcgagcaaaaaaaaacccactcgataacagaatgcacgttctgtcatcgagtgggcttctttgccgtagtgctatttaggtaaaactaaacagccggattttgtagttgcagttatctaatacacattatgtgccaaaaattttcctcattaaaaatcagcaacataaaaaacattagctttttattagccacttttttcaccataacagtgcatacagctcacaaaaatagggcgcaaccgatttcttgtatcaggctgtattttacttgtaacgggggtttacagtttgcataaaaaaaccgcagcttaacgtctaagctgcggtttttaataaagcatatttacttgttaagtaaatgcttttcgaagaagttagccatcatagtgtgatagtgcagggtagtgcctttaccttctcgtaggctgtgagaacggttcgggtaagagaaaaactcgaactgtttattgtgcttaactaattcattaattaaacgctctgagccttggtagtgtacgttatcatctccggtaccgtggatcagtagcaacttaccttgcaggtcttttgcaaaggtgatcggagaggtgttgtcgtaactttcaggatcggtatttgggttacccgcatagcgctcttgatagatggtatcgtacaagcgaatatcaggcactggtgctgaagcaatacccactttatatttatcaccatggcggaataacaaattaagcgttgaactaccgccacctgagtgaccccatacaccaacacggtcggtatcaatgacatcccaacgttttgccattgcatcaagggcgtcaacttggtcacgcacggtaatagagcctatttttttgtagatagacttacgccaatctctgccttttggtgcgcgcgtgccgcggttatcaactgaggcaacaataaagccttgctgagttaaatacgacttgtataagtaactgtcgccttcccagcggtcttgaactgttgagccccatggctcaccgtaaacataaaatacgattgggtattttttgcttttatccatattagctgggaacatgatgtagccatcaagctcaacaccatcacgggcattaactttaaagaactcgtgagtcggtaattgttcagtcgctaatttctcttttaatactttgttctcaactaaggttttcacattactgtgatcgcttactttgatgatctctttcattggtggagtgccaaacttagagaaggtatgcatcgcccaagaggtatctttagacatgtaatagctgtttgaaccatcaaatgactcaggcgttacgcgcaccggtttagagctgccatcaagcgaggtacggaataaataacgctggcctggatcatccggtgatgcagtaaagtacataacgtttttatcttcgttgagcgctagcatatcaatgatgtcgtactcgcccggtgttaaatcaacaaccgttttaccatcgcgagatacacggtatagatgacgccaaccatcacgctcactgtgccaaataaagaacttaccgtcttttgaccagtttgctttataaaaccactcaataaaggcatcgtctttatcttcaagaattttagtcagctgttgtttttgccagtcgaataaccaaaccttgttgtggctttgcgggcggttaagatcttggatcatcaaagattcaccagtacctgcccagctaattcgtgggatataacgatcgcgattatcgccacctagttcagcccaacgggttttcttgtcgctaagactaaccacacccactttaaccgcagagttcatctcgccggcttttggatacgggaattctttcagggtagggtagagatcatcggtgttattgatcatggtgaagtatttcacgccactggtatcaagctgccaataggcaattgatttgttgtctggactccatcggaaaccatcacgaatggtaaattcttcttcgtatacccagtcaaaattaccattaacaatggtgtcgttaccgtcagtggttaaagcagtcacagccttgctgccgactttttccatgtagatgttgttatcacgcacgtaagctacttttgagctatctggtgagaactttgcaaacatcagctttttcgcttcgatgttttcaccacctaactgatacagcgaatcagtttcgaggtttaatagccaaaaatcaccacggctacgtgagcgccacacttgctcgccattggtaaaaaccatcagccatttaccatctttagaccattgatagctttcaacagtgagtggctctttctcaccttttggaattaatttttcgtagctaacaagtaccttacgacccgtgccatcggcgttataaaacacaatatcattgccttttacgccgtgctcgtcgtctttagctttatcgtcttggctgtttttatcgctttcgcgctcttcaagtaccgtataaccagtaccatcatcgagccacgtaaaataggtgctacgctcagctttaaagtctttttctttataaatttgttcaagcgagagcggattagccgttgcgttcactgttgctgatggcgtgcttacttgctctgtacttgagcatgcttgcaaacctaaagccgcaaccacagcaaacgcaagggttgatgtttttattaagttcattttgttgttcctaggttttaacttacctagcgtaccaaaataaacttataaaatctgagcctttatcgtgttatctggggggttgaacttaaactcaatcgtcccacaagaacatactggcttgcttgttggcaatacgtagttcgtagataccactacaagggcgcatcgccgcaccatagcaaacatgtaatggcaataagtgctcttcacgaggatgactaaaacgcgccgcaggggccatttgccattctaataacttagcttgtcgctgttgttcactcagctcagtattgccacatacatcaactaaccattgctcaaaagcgatattttgcgctttaatttcagcagtttctggcgtgaaaaatgcgcgcatattatgaaaagtaaagccagaaccaatgatcaataaattatcgtaatcaagctgttgtaaagcctcacctatcgctaggtgtaagcttggctcaaggcttggatgtaacgacaattgcacacaaggtatatctgcttctggatacataatcttcaaaggcacatacataccgtgatcaaagccacgagatgagtttaatgtgctatcgatattagcctttgccaatgcttgatgtactttttcggcaagggctggttcgccagggcttgggtactcaatactgtaggcaggctcaggaaaaccatagtaatcataaattagctcaggagcagcgctcgaagtgatgctaatagggtttgcttcccagtgcgcactcaccatcaaaatagcagacggctttttaatttttgcagcaatagactgcaaacaagtgaccatatcagcatgacttggatcgccaagcaatggcataggaccgccgccatgtgaaacaaagaaaacgcgtggcttttgcataaatgtgctccttaaatacgcttatctctatagtgcacgcacagaggtacaataaccagccacaaaaacgcacaactagggtgtgaatttacacaccactagtttgtaagtactaacttaaatgccaagcaacgttcatggcggggacttgccctcttaagccaccttctagaggctctttgcacagtaatgttagttgataaaaagcatcgtagtgctgatgtagctcatcggcgactacactaaacggtggacccgaaaactcactttgctgatactcaaataccaccactaactgcgttgctctattggttaattcaagtaaatgctgggtatagcgaatgcgcatgggctttggcagcgcgactaaagcggcacggtcataaaccgcgttgatagtgccaagttcattcgcggtaagcgcaaaaatatcacctacccaaacggttagatttgcgccttggtaacgtaatagttcgccatgttggctaatttcgggttctagctttaactcatcaaataactgcttaatggctatctcactaagttctgccccaacaacacgcataccttgcgctagcaaataatgaatgtcgtgagtttttccgcacagtggcacaaaaacagtatcgccttgctgtaaatttaagttagtaaaatactgatctagataacgattaacgtctccctcgtgaaaacctatttcgttattttcccaacgttgatgccaatgcgttgcgtccattagttgctcctaaaatgtttcaataaaaacatgataactaattacaaaagtgataaaaatagcaagataaacaaacaatgattgcataaatgagaacatgattgacgatatcgctctattcatacagattgttaaacaaggtggcctgagtaacgcagctgaaagtttgtcgctacctaccgcgacagtatcaagacgcttacaacgacttgagcaatgccttggggagcagctattaaaccgctcagcaaggcaatgcacgttaacgcaagcaggggaggtgtattttcaaagttatgttgaattaattgagcaatttgaacaaacccatcgccagcttaatgagcaaaaagcacaattgtcaggaaagcttaaagttttagcacctctgaatattagtcatggtttcttaaagccaatgtggctcgcatttactaaacagtaccccgatattcaacttgagctgctacttaataatcaacttgaggatctgagtaaaagccaagctgatatagcgataagagtagggccacaggccgattctatgcttcatcaaaaaaagttaggcagtgttgatactttatttgtaagcactaaagcataccttgattcggcacctgccttagaagagccagctgatttaaaacagcataggttaattggcaccacactaagaagtaaatggcagttgaccaatacacaaacgaatgcaacttataaccatatgtgccgatttgcgagcacttttaacgacactggatttgtaaaatacttagtttgtgatgagcaaggtatcgctttgttacctcggtttgaggtaatagatgaattaaaatctcagcaactagttcaagtattgccacactggcgaggcgaaaaccgcgatatttatgcgatttggccaagcgcacgtttactgagtaaaaaggctgcctgtttaaaacagtttataaccgactacattactgaaaaattataaagtctgccattgatactccatctgtttagcagtcaacaaggcgtgttcgtagctaataaactcagcgactaaagccaagctcatatcaatgccagcagaaataccacctgaactggtaaacttaccatcagtgacccaacgagtatctgcaatcacattgagatcagaaaacatagcagccagctcaggttgatcttgccaatgtgtcgtgacatttttaccacttaaaagccccgttttagcaagcaaaaacgcccctgtacaaacactcgcaacacgcttggtgttagtggctgtgttttttaaccaagcaataacctctgctttttctagctctcgtgtatgatcacctccaaccacaacaagtagatcaagcaaagggcagtcagcaaagctgtaatgggggtttacactataaccaccgcgggcaagtacaggcctatcattttcagcaattaaactcacttgccagtcattattcgctagacgcctggcagtactaaacacctcaaatgggcctgagaaatcgagtacttcagcatcatcataaatgtaaatcccaatattcatacaattgttcctaataactggatttatttctcaagcaaaaaatcgtactatgcgattttcgcagtccgttaataacatattattaaactgagcgcggtatagaaacaaaactttaaggcattgttaatgcgtttattattattactgacagtattgcttgttggctgtaaaacaacagagcatgcagtgaatgaaatcagtgagatatcgccgggcacaatttactacaaaggcgaaacttccaaaaaaagtgtcgaagagtttgaaaaactattagttagtagccgtaaccaaatagataccttagtgatcaatagtgaaggcggcgacgttatggccggcctacatttaggaggcttagtgcatgagtatcaactcaatgttgtggtacgcgagctttgtgcatcgtcttgcgctaattatgtacttaccgctagtccacatgtacttgttgaagagcaagccgttataggctggcatggcggctcattacagccactatacgtgcctatggaacagcctcctgaagttgctagctatattgcaaaatggcaaaccgcagagcgacaattcttcgatatcattaatgttgaacaggcggttactatcataggtatgatgcctggtattacagagaaacgtgattctgctatttatagttacgacgctcaaaccctgaagcgtttagggttacatattgaatttgctggtgcgcaaacagggaagtcagcaagtggcgaaaaaatcgcgcaggtattcgaacttgaagagtctgtacttaaccactttttgatgctcaacgatattgtttcagcagaacttattaactaataaaaagccaacaagacgttggcttttttgtatcgcatttaatctaactctaattgggctttttcaacactttccgcgggcaactctttttgaacagaaacccccaattctttgaactctgaggcctgcttaattaagtttcctttaccgcggtacagctgagaaaacgctttatcatagctttctttggcgcggtctaattgcttgccaaccccttccatactggttaggaaaccattgagtttgttgtaaaaacgctcagcacgggcggcaagctcttttgagtatttagtttgctcttcaaaacgccacagttgttttacgatgttcaaactggttaataacgtcgttggtgttgcaactaagatattgttttcgatagcctgctgatatatatcactttggtatttaagtgcttcaacaaaagccgactctatcggtacaaacatgatcaccacttcaggtgagttaataccgggtagcctatcgtaggctttgcttgctaactcgttaatacgtgattgcaccgccgctacatgctctttaagcgcttgctgtgcttcaagctcagtatcggcgtttacatagcgtgtataagcgtttaaagaggttttagcatcaataactaaatggcgttgctggggtaaatacaccacaacatctgggcgtagacgaccatcttcagtgttaaacgacacttcacgttgataatctacacctgcacgcagcccagcgctgtcgagtacattttcaagcattaactctccccaattaccttgggttttcttttgtccttgtaatgcagtgctcagcctatctgcttgctcagtaatagcttggcttttagcctgtaaatgcaataactcagtttttagtgctgcacgttgtttaagatcttcaacgtggatcaattccatcttatcgcgaaagccttttagctcaccctgaaccggttttaatagttgttcgatgctttcttggtttagagttttaaaacgctgagacttctcttcaaggatttggttagcgaggttttcaaactcttttttgagttgctctttgctctctttgatatgactaagctgctctttaaagtgcagctctttttgctctatcgtactgcgtaaggtacttaattcaacatctcgctgattaagagccgctttagtttcagtgagttcggcttcaactctacgccaaaattggttgtattgttgcgcttgtttttcttgttctacaaaacgggttttaaaatgttgcgattcatcacgctgttcagcgtaatcttgctgtaactgtgaatgcgaaagttggctttcttgcagttgcagctgcttttgctctaaattgctttgctggatttgatagctattttgcagctcggttaactgattttttaagcgacttttttgcaaggcaaaaataacaccacttgcaactgcacctacagcaccaccaagtaccacactttgccaattaatctgtgcaattagctctgtaatcataacgaaaactcaataacttgaagacacatcatcataacgaattagtactcggcagagtaggggagcaggcataaaaaaagccagctcaaggtgagctggctctaacattactaaaatttagtaaccaaatgggaaatcaacataatgcttatgtaaactgcaatttaacaacaagcataataatagacgccccaaaatttgattagttcaaaaaaactttaaaaaaatttaattttttatcagagcaagcatttgctcttcatcaaactgagtaaaactcattgatttttcggtaaataatgcatcaacaagggcttgcttatgctgctgcattttaaatactttttgttcaattgagttagccataattaatttataaacaaacacagggttagtttgaccaatacggtaggcacgatctgtcgcttgtttctcaacagcagggttccaccaaggatcaaaatgaatcacagtatcggcttgagttaggtttagccctgtaccaccggctttaagactaattaagaatacggatgtatcaccttgagtaaactcttcgataacacggtcccggtgtcttgtttgcccggtaagcatactaaaactgatgcctaattcatttaatcgctcagctatgacatcaagtgccatggtgaattgactgaatataatcaccttacgaccttcgctaagcatgataggcaaatgcttagataaccattcaagtttagcgctgccagcttgagagcttggatcaatcagttttggatggcaacaaatctggcgtaattttaataacgcatctaaaaacgcaagtttactcttttgcacaccttgctgagcaaataaatcgacaagcttttgctcaagagattctgtaattcctgtatagagttctttttgttttgcctcaaactcaaattctttaattagctcagttttttctggtagctcttgagtaacctgtgctttagtgcggcgtaagatgaatggcatgatcaaagacttcaattcatcagcacgctgtacatcgttatcacgctcaatcggcgtctggaaataatctttgtaatgagcttgtgagccaagtaaagaaggcatggcaaaatcaagtaaggacttaagctcaaagaggttgttttcgataggtgtgccacttaaacataacttaaagtcagcattaagtcgtttaactaagcgcgaaacctgcgcagcatcatttttaatgtattgcgcttcatcaagaataatattttcaaaatacagcggtgaataaaaagcgatatcacgtttaagtaaagggtaggtcgttaaaatacaatctgcctgtgataactgctgcaattgctcgctgcgagcagcaccaaacacggtagtaatttttaagttactcgcaaacttattaatttcactttgccagtttccaaccaaactggtagggcaaataattaaagttggtcctgcctgaggtaattgctttgcgtttgccaaaaaggcaataacttgaagggttttccctagccccatgtcatcagctaaaatcccacctagttggtgtcgttttaaaaagttgagccaatcaacaccgtgttgctgatattctcttaactgcacacccttgtttaatccttgaatatcggactttttaattaactgttgcgaatgacttaattccgctaaataggcatcaagcgtatcatcaacaatattcactttaatggctgtctgctctattaattgtggtaaaaatgacagcggcattaaaatttcatcacgtgtttttatgtgttcaaaacgttcacggtattcatttagttgcgctatggcagctttattaataacagcgaaacgcttgcctacattaaaatagaagaactgctcactttgcctgttaagcgattgaaagtttttatcatcagtagtgaaaagctgctgcgtcttaacaccagagatcactattttactaactatttggtgacctttgccgcgttgtacttgaagtgaaagttgctttaaagctttacctacatttagatcgtcgttaattttccaaccgcgttttgacaagtttggaataatttcaaactttaaccagtgttcatgtataactgattgtttattaaatataaaatcagtttgtaaagcccctttacaaagctcaaaaccaaggttaattaattcatttacaacggtattctcgaatgattgattaataatctctgcaggagcttggcttaaatcatacaaagaacgttggtaattaaacttaagtgataaccgaatagttccttcatcattatttaagctaatgacaggaaaaacactacgcgcattacaaattttattctctttgtacgcatgagggattaccccttcaccaaaattatcactgagctgctgatagactcgatcaaagttttcactatgtattgcaggcatatttgctagtaaggcaatttcatcagctgttaaaggtgttctgatgcgaccaacttttagcttgtcagggtcaaggtaagtaggcggtgttgtttttaataataaccaattatcttgacctgcgagtgtcatgctcaatgaggttagatctttattttgtttccaatcaaactctagagcttgcatggtatctgctttaatagcttggcgagaacgacctaagaatagacgctgtgtggcaataagttgttgcagggccgcaaacccccattgacctttaagctctaacttaccaagggcattttgcgagcggatccaactataaagtcgaaagtcagactctagtaaatctgttggtgtaacaaagctatttaattgttgttcagtaaggttgcggccaagggtatagttatgatcgggatcgaaattagctattttaggcgttaatgttacaaccgatttttcaacatctaaaacaaaaagtagaacttgtttggctgtatcattcgatgcttgctttaatgttttaagctcactaaaccaatcattaataatataatcttcgccatagttgcctgaatgttcaatttttaacttgagtaaaactgcagcgatgtggcggcattttgtttttgaaccacatgtacagtgtgaatcgaccgaaaaaccagttggtaatttactgatctcgatatgctgggtaaatgtatttccttcattaccaaacatagatgcatctataacactaaaatcactattgtgttctaaccagttgatttgaccgttctgatgatactctttagctttacttaacacatgcggcttaaatagctgtttgatgaatcgttcagaaagaggaaactgggtttcttgctcttgtttgatttcctcaaagatagctaataagtcatttttggataagttagcagacataaagtttttggcagtaaaaacaaaaaataattctgccagtatatgatctatcggcgatgagctaaagcactaataagccattttggactggttggagctgataagttggtaaaaaagtgttttataaaacagcaaatcgacttaaaacacaaaaagctgattttacaaacagcaatcgcacaagttatgaacaacttataaacaacgaaggggctttacagatcacttttttactaagatatgtaaggaaaaccaaaaaagagctgtaaaggggttataagttagtaaaatagtgatctgagagggtaggatcttatgattattgccaaatgagatcattattttactaactaaacaggagaacagatcacgcttttactaacataaaaagcgtgatagatcgttattttactaactaattaaagctatttaatagctttgttaattgctctaagcgtttgtcagtcataactttattatctattttcacagatagatcaccgcttttaatgttgcgctgtacaacaacaaattcactatcaagtattgcttcacggcgactagtcgacactggctctgcagttaagcgtttagtgatagctaaagcgcgtttgtcatcactgctaatagccgcaagctcagcatcagaactgatttcgtcaacaagctgagtaaacgcttgctcatctcgctctttagctgctatgagctttttagcgacctcacgacctacgtgatttgcagtagggtaaaggcttaaaactgttgctggaagattctcataagctttgattgcatcagcaattgcagtgtgagacacgccttcaatagcagcaatttcacgataagagccttttttaccttcagcaataagctcatcacgggtctgttgatatgcttgaccaagctcccataaactcggggcaatgtattgatctgaagaaacggcaagaatttttgcatcttgatctgtaaagtctgcagagcttaatactaagtaatcagaattacttaaaatacaggctttacgacgacgtgagcctgctaatacaagcatttcgtcacctttatcccaacatagggcagggtgctggttacgaccgtcttcagcaattgcaggtagaatatcggcaactgacttttcgtttagaagtgattgtactcggcggtttttaccgtatacctttgttttagcttcaatttcagagctagggatcactttacataccaacgtgatttgacgggtaggatcactaggagcaggcatactgataacatcaccggcagatgctttttcaagcaatgcatctaaactgctactttcaatagaggttgaaaaaggatctaagctggtatcatttttacgttttttagccatctttattattaaccttacttagctgtatttagtgttgattgagttgattgccagttagatctgatcaacatttcaagttcatcaaccacatctttgatattttcttgagcacgtaatagtgactcgcgacttgctaagctgtcagaagtcttttgatcaaaaatggtattaaatgatgatgagctggctgttatagcagaactatgatttatagggtaactcattacttgacgaccgaaggcactacgtacatcttttacgatatcacgctgtgagtgattgcctttcacatagttagtaactaagaactgcataaaatcccatccctcgtgaccaagggctgcaactgtatggtatatctcacctaatcgttttaaatatttattgttggcatcaaagtctactgcttctggatgaacaggaataagcattgatgtagaagccattaatgcattataaaacataaagttaagagaaggagcggtgtcaattagaatgatatcaaattgatcttttactggctcaataactttctctaataacttgtggtaatgacgtgttttatcgtagcttgagctgtcttttagtaaagtggctgtttcatgctcaaaataaaagtcatccatacctgaaggtaagatacggatattaggaatatgagtaggtagaaatgcacttgtaactaattcatcccacgtttcattatcttcaagttcaatacaatcacgcattaagtcacctacagtgattggatcaggttcacttggtgggaaaaagcttgaagatgaaccttgtgggtcaaggtcaatgataccaatgcgataacgtttaatattggtggtagccagagctgcggctatattaaccatactagttgttttaccacatccaccctttagtgaattaataacaataacttgtaatttatcatctagagttcggtgatctggcttgatatccatgatatctgccatagcaaaaatattgactaacgtataagcatagtgaccatttgcgccacgtttgatattcaattcatcaaagtcaccattgtcatggcgtcttttaagggtgcgattattacaacctagtagatcagcagcggctttttgagtgtaagtgcgaagttctttttcttcagacttaagatgggcacggtaatgttgaatacgtccttctagcgatttttcagcaacttctgctgtcgcttttagtaacctataagtggctagcgcattattattgatagacatactttcttcctcaaagttatgctttaagtataatgtccattcaaattgctgtaaacaagtatttaagacgacataccttttattaataagacatttaataaaaatttgtaactttacttatgctaagtataaataagtaagtttaatatcggttaaatatataggtatataaggttaagatgctaaaatagtgtaatatctagctgatttgattgaatatttcataaaatagcagatcataattttacttggttaagatcagatctcttattactcacagatcagcttattactaagtaaaaaatgggctttttagttatgcacagcttaatcactaaattactcacaattatgtctgtgtagatcaaaattttactaactaaattagaaagttatacactggtacccaggtaaatttaagcatttagttagtacggatctgatctatagttggtacagatcagatctatgctaacttaaacttggtttatccacatgcgatttaaaaaatagagatttatgtcgtgtaaataagccttaaaaagtagattcaccggacataaattgaactgagttagtaaaatcgccacctatgaactataacttagtaaaaatctgatctgaaaattagcaattacgagagagttagtataaatctgatcctaagaaattaattgagatcggatcaagtttttactaacttaaacatttaactttttaagttttatgtgttgttattaactgtcgaagaaaaattggaaataagaacaatgagccgaaaggtcaacatctcggtagataacttacccgatacattacgcgggcagatccacggggtggaaagtgcaatagataatgaaagtctagcactatttacagacaacaaagatgtgcgcgtttcaattgaaaatgctgctcatggtttgagagcttactcaaatacatttaatcattatgatttatggggacgttttgtccgttctggtcataaaaagcttccggttgaagaagcaccaaagaaaacaatagttacacgcagaatctcagaaaaagtagacggcattctttatgatggcgaaataaaaattacacctgcggtagtaagcactcgtaaagatggtgaagatgttgaatatcttgtttggccatctgaccgagaagaaaaagtcgagcgagctctgatccgtttagcttctaaaggtaaaattgtaaaaattaattttaaatcgggtattcaatacgcggttgtattttcaatgaatgaattggcgcaagagctgaaagctgttggccagtcgatgccatatcctcaaattaaagaatctttagaagcattacaaggttctaaactttcatttagatattcagcaaccgacacccgcaattctgatattgatgattcattttacgaatcgaatatgaactttttatcgtcactgcactttagtggcaagaaaggtcaaggtggtaacgtaaaatgtgttgcatgtttaaatgcgttcgtacataacatgatcgataatcttgaatataaaggttattactttaatagtgcacaagaattaaagcgtggtttatcacgttggatgatgctgcgtttgtatcatttatggcgttatgctgcaccgggtaaaacctaccattttcgacttttatcaattatggaaaagtacggatcaatctactcgacagatgaaataacagaaaacaaattgaaagcattgcgtcgtgatatgacgacaacaatgaaagatttgatcgagaaaggtgcaatttcagaatataacattaccaacgttaaagatgataaaacaggtaatattattgattacacttacgagatgcatccgtctgaccaattttgtgatgagattcttacactaaataagcataataaacgaatcgaaatacaaggtggcaaacgcattgttgagaatgcagttttaattgatgaagataaaattgaagaaatagttgaagactaatttctttaatactactaactacaaacaaaaggccacataagtggcctttttaacataatcaatctgttacttgttctaagtaaagtctatctactaagaaatcatattctcttttacgaggatggctttgtggtttttgataatcagataacgtaccaagttttacatctggttcagggtttatcaatataaatggtaaagcagcgctaacatgatatctgttctgagcagtgtatctcacattaacttgtgggcttacccttgttggtctacgaattcgtaatttctctttatcacctaaacttgcaacacgactttgttcttgtgcaacaagtgcttgccaagaatgttgatcgatcattcttggatttgaataacttgcagacttttctaacatagcgagtgccatttttttcgttagtgttttagttgcatgtttgtgcatccaagtaaaacgaacagagtagggtgactctgtttcatagtgaattttacgataggcagctaaagtaattaagtttggcacagcattatgaacagcttcaaagcgtgcatcgttattatcgatagccaacacacaatttttaaaatcagctttggctttgtttatttgattgattctggcggtaatattttgtttatcaacatctttaagcactaataagccaggatgccttttaagtactcgactacttaagcccgtctttttataaaaatcaccaaacgaattaatgatttgtttttgtgcatcagcaccttcaacttttatgacaggtattgccgaagggacttttttctcatcgtttatatcaatatcaggtaattgataatatgacgctttatgaaaatcaagctgttttaattcatcacaaaataggtgggttaactcattaactaaatcaaactgactgcgaatttcaagtttagtactcataggaacacatcttacatatagattccctaagtttaaccttatcacttgaccttttaaatatttatttcactcagtcgttgaccttacattctcttttaataaagtatgatgtgttccttatttgtagtgcttagcatgtatttttattatttcaacttagtgataaaaaagtgtttttaactagcgtaaagttgaggttacactagtgctatctaatagtaagatgtgttcttatatattctgtaatagaagttcgctatacacagcaggtaacttactgttctataatgtttaaatcgttattttttaattattcatagctaaagtatttatcaaataactaaataattacaaatagctgaatattgtccttgaacttagtacctgcaataagttagttttcgttaacggtctatgttaggaatgaggaaagaacatgcaatcgtggaacccagacagctggagaaaactgccgatacttcagcagccagagtacccagatcaagaagccctaaaatcagttgaggggcaattaaaaagtgcaccacctttagtttttgctgaagagacgcgtagcttatataaacaactagaagctgtatgtgagggcagagccttcttattacaaggtggtgattgtgcggagtcattcagtgactttaacgcagcgaatatccgcgacacttttaaaacacttttacaaatggccgtcgttttaacttatggtggtaaatgccctgttgttaaaattgcacgtatggctggtcagtatgctaagccacgctcatcagattacgaaacgattgacggtgtttcattgccttcataccgtggtgatatcatcaataactttgaatttacagagcaagcgcgtattccagatccacagcgcttaatgacggcgtaccatcacagtgcagcaacgttaaatttattacgtgcatttgcccaaggtggattagctgatttacatcaagtaaaccgttggaacatgggttttgttgctgcaaatccacttaaagagaaataccaacagttagcagacagaattcaagatgcccttgaatttatggaagtgtgcggtatcgactcaacagttgcaccaagcttaaaagaaacagacttatttacatcacacgaagcattattattaggctacgaagaagcattaacacgtcgtgaccatctatcaggtgactggtacgattgttctgcacactttgtttggattggtgagcgtacacgtcagttagatcacgcacatatcgagttctttaaaggtattaaaaacccaatcggtgtgaaagttggccctggtatggacccagacgagctaattaaacttatagatgccgttaacccagataacattcctgggcgcttaacattaattaccagaatgggtgctgatgtacttccagagaaactgccggcactggtacgcaaagtacaacaagaaggccgtaaagtaatttggagctctgatccaatgcatggtaatacagaaaaagcgagctcaggctacaaaacaagaagctttaataatatccttcgtgaaattagccagttcttcgcagttcataaagctgagggttcatacccaggcggtgttcaccttgaaatgactggccaacacgtaactgaatgtaccggtggtgcgtatggtttatctgatgaagacttagcacaacgttatcgcacacagtgcgacccgcgtttaaatgctgaccaagtattagaacttggtttcttagtcgcagatttattaaaagacgcacgtaagtaacttataagttatacaaaaaaggctgctatttgcagccttttttaatgtccgatactaaagaaagttagtacttacgtctttcaagacctgtatcagatataatctttgcagatatttcttcaaccgaatgatgtgttgaatttaaatattgaatcttttgttttttataaagcatttctacttcacgaacttcaattcgacactgttttaaagacgcatatttagagttcgccatacgacgttggcgaatatcagcaaggcgaacaggatcaattgttaaaccaaatagcttatgtttgtaggcctttaaacattcaggaagggtgccacgctctaaatcatcttctgtaagtggatagttggctgcttttatgccgtactgcaaagctagatataaactagtcggtgttttaccacttcggctaacgccgacaagaataatgtctgcctcagaataattttttatattagcgccatcatcattggtcaacgcatagttcaccgcatcaattctaaagtcatagcttttctcatgcattgaatgtgttctatgtacttttggtacaggggcaacattgagttcttgagcgattttatcactgtattgcgataaaaagtcataacataccgcacatgacgattttataatttcacttaattcatggttcacaaaagtgaaaaataccaaaggttgctcaccatctcgttgagctgttgagttaattaagttcctaacttcgtttgcttttttttctgtttcaacaaaaggaattgttttgtgattaaactccacaggaaacatagataaggtcgcatgaccaaagacttcggaggtgatagctgttccatcagagatataaaatgcagttctcatatttaacctttttattacctttatctgcaaaataggggcttcacggtttacgtgaggtctgttgccagtgtagaatgactacgacctttttagaaggttttctttcttaactctcacagttagtactacaatttgtttatggagaaagatccgtgcaagaatacgttctctggtatcaagagcttggtatgcaagatgttccacgtgttggcggtaaaaacgcttcactgggtgaaatgatctcaaacctagctaacgctggtgttcaagtgccaggtggtttcgctacaaccgctgatgcattcaatgagtttctagagcaatctggtttaaactcaaaaatccacgatattttagacacattggatgtggatgatgtaaatacactcgctaaagtcggtgccgaaatccgccaatggattatcgacacaccattccaacctaacctagaccaagccattcgcgacgcatacagccaattacatggcgacgcatctcaagatgtatcatttgcagttcgctcatctgcaacagcagaagacatgccagacgcttcatttgcaggacaacaagaaacgtttttaaacgtacgtggtattgattcagttatgactgcaatcaaacacgtgtttgcctcactatttaatgaccgcgctatttcttaccgtgttcaccaaggttatgatcaccgtggtgttgcattatcagctggtatccaacgcatggttcgttcagataaagcagcttcaggtgttatgttcagtattgatactgaatctggctttgaagatgtagtatttgtaacgtcaagctatggtcttggggaaatggttgtacagggtgctgtaaacccagatgaattctatgttcacaaaccaacacttgctaacggtaaacctgctgtagttcgccgtaacattggttctaaagcaatccaaatgatttactctgcagatgaatcacacggtaagcaagttgaaattgttgatgtagattctgcactatcaaacaaattctcaatcacagatgctgaagttcaagaacttgcaaagcaagctgtgatcattgaaaaacactacggtcgtccaatggacatcgagtgggcaaaagatggtaacgacggtaagctttatattgttcaagcacgtccagaaactgttcgttcaaatgaagacgcaaacgtaatggaacgtttccaactaaacggcacaggtgctgttgtagttgaaggccgtgctattggtcacaaaattggttcaggtactgttcgtgtacttaattcaattgacgaaatggacaaagtacaacaaggtgacatcctagttactgacatgactgacccagattgggagccaatcatgaaacgtgccgctgcgattgtaacaaaccgtggtggccgtacttgtcacgctgcaatcattgctcgtgaacttggtattcctgcagttgttggttgtggtaatgcaactgatttaattaaagcaggtcaggatgtaacagtatcgtgtgccgaaggtgacacaggttatatctacgaaggtattttagattacgaagtacttacttcacgtgttgatgaaatgccagaattaccaatgaaaattatgatgaacgtgggtaacccagatcgtgcattcgacttcgcgcgtttaccacatgctggcgttggtcttgctcgtgtagaattcgtaatcaaccgtatgatcggtgttcaccctaaagcacttcttaactttgatgctcaatctgatgagcttaaagctgaaatttcagaaatgatggcaggttatgaatcgccagttgaattctatatttctaaacttgtggaaggtattgcaacactaggttgtgcatttgcacctgagcgtgtaatcgttcgtatgtctgactttaagtctaacgaatatgcaaaccttgttggcggccagcaatatgagccggaagaagaaaacccaatgattggtttccgtggtgcagcgcgttatatctctgaagatttccgtgactgtttcgcgttagagtgtgaagcaattaaacgtgttcgcaacgaaatgggaatgactaacatcgaaatcatgatcccatttgtacgtacacttgaagaaggtaaacgcgttattgaattacttgaagagcacggccttaaacgtggcgaaaatggtcttaaagtaatcatgatgtgtgaattaccatcaaacgctttactagcagatgagttcttagagtatttcgatggtttctctatcggttcaaacgacttaactcagttaacattaggtcttgaccgtgattcaggtttaattgcacatctatttgatgagcgtaaccctgcaatcaagaaactattatcaatggctattaaaacagctaaagcaaaaggcaaatacgtaggtatttgtggtcagggtccttcagatcatgaagactttgcagcttggttagttgagcagggcattgattctgtttctctaaacccagatacagtattagaaacttggttatatcttgctaaaaaattagccgactaagtactttatttagctaaaataaagaacctaatataaaaaatgccagcaattagctggcatttttgtttcttcgaaggacaacacgcgctttagggtaataaaatgataaacaaaaaagcccggcaataaaaaaaataagcgaaggtccaggtacaacaataaaaactaagcccagtagtaaacttagtaaacccaaactgattaatgcaattttcttcatatccatatctctttgatgcttttataaacagtataaaagtaatgctttcaaaatcgataaaaagagtgttacaaactgtaaaatcttcaatttaacttagctactagcatgatataatttgcaaaatgtcttaatttgtcaccgtcatgatagcaacaataagtcaacaacaagtcgcatctgaattagtcgctaattatttagaaacgattaaaaagcaaggttttaacggcgatactgatgcaagtttttcaacgcgtttgagcttatcgaccgataacagcgtgtatcaacaagtaccgcagggtgttatctttccaaagtcagcgaaagatatacagctggctatgcaaattgcctctcgtgatccttttttatcactgacttttggcccgcgtggcggtggtacaggtaccaatggtcaatcactaactcctggcattgttgttgatttatcacgatacatgcgtgaaatattagaaatcaatgtcgaagaaaactgggttagagtacaaacaggtgtaataaaagatcaactaaacgactttttacggccttatggttttttctttgcgcccgatttatctactagtaaccgcgcaacaattggcggaatgataaatacagatgcttcaggacaaggctctttggtttatggcaagaccagtgatcatgttttaggtcttacaacttatcttgttgatggcactgaaatgtcaacaaccccaatgcctatagaaaaagctaaagtaattgctgaacaaaacaccacggtaggtaaattatataaaacagttatcgatattggccttgataatcgagacactattttagaaaagtttccacgcttaaatcgctttttaaccggttatgatttagaacatattttttctgatgatttacagacctttgatatgagccgattaattactggttctgaaggttcgttaggtatagttaccgaagcaaaattaaacattacgccaattgctgaatttaagacattaatcaacattaaatacgatagctttgattctgctcttcgtcattcgccattcttagtcgcagcaaatgcgacttctgtagaaacagtcgatagcaaagtactgaatcttgctcgagaagatattatttggcattcagtatcggacttaataaccgatgttgaaaacaaagatatgcaaggcctcaacatggttgagttcaatgcggtttcaccagaagatattaaagataaagttgagtccctatgtaagctacttgataaatgtgtcgaagagcaaactaatggggtgatcggttatcagttaaccaatgataaagctgatattttaaaaatttatgcaatgcgtaagaaatcagttggacttttaggcaatgtaaaaggcagtcaaaaaccgttagcttttgccgaagataccgctgtaccacctgaaaacttagccgattttattgtagagtttcgcgaactacttgatagccataatttgcaatatggtatgtttggtcatgttgatgctggcgtactacacgtacgaccggcacttgatatgtgtgatcctgaacaagaaaaattgcttcgccatatttcagatgaagtcgttaaactgactgccaaatatggcggcttaatgtggggcgagcacggtaaaggatatcgtagtgagtatggccctgaatttttcggcgagcatttatttacacaactaagaaaaatcaaagcggcatttgatccaaataacagagtaaacccaggaaaaatatgtacgccaattgaaagtaaagactcactagtttctgttgacgatcaaaagcgtgcctggttcgacaaagaaatttctatcgatgttaaaacagaatttaataacgctatgacctgtaacggtaatggcctgtgttttaattacgatgaaaaatcaccaatgtgtccatcttataaagtaacaggtgaccgccgttattcgccaaaaggtcgcgcaagtttaatgcgcgaatggttacgactgcaagagtctgaaaatattgatttactcaatgttgaaaaagaattgatgaatggtgaagtaatcacttggtgggagcgctatcaacatagtcgcgataagaaaaaaggcgtttatgatttctctcacgaagtaaaagaatcaatggacgaatgcttagcttgtaaagcatgtactactgcatgtcctatcaaagttgatgttcctacattccgttcacgctttttaaatttctaccatagttattatgcacgtcctgcaaaagattaccttgttgcgggtatcgaacaaacagcaccggttatggcaaagtttgcaaaagttattaatccgatagtaaatagcaaacttgtatctggactaattaaaaataccatcggttatgttgatacgccaagtttaagcgtaccgcaactttcaaaacgtatttcaaaagatcagcaattcaattttgaattactaaattcgctctcaaaagaacaacaagccgaatatgtactgatagtacaagatccatttactagtttttacgaagcagaattagtcgaaagctttattcaagtaattaaagcgttaggcaaaaaaccgatgctattaccctttaagccaaatggtaaagcacagcatgttaaaggttttctaaatgaatttaaaacgacagcaaaaaatgcagcagagtttttaaattcactcagtgaaattaatgcgccacttgtcggactcgatgcgtctttagttatgtgttaccgagatgagtatgtatcaattttaaaagaagaccgtggtgattttaaagttgagcttgcacatgaatggcttcaaacacaaaacttcaatcagctttcacttaccactaagtcgaattctacttttaaattattaagtcattgtactgaaacaacagcaatgccaaatgcgtctaaagtttggcaaacaatttttgctgatttaaatttacatctagacacaacgagtacgggttgttgtggtatggcaggaacctatggccacgaaaaacaaaaccaagaaaattcacgtgcactttatgaaatgagttggcaaccaattatttataataatgagcctgaaactattttagcaacaggtttctcatgtcgtagccaagtgaagcgttatgaaaaattcaaaccaaagcatccactgcaattaattgcagagctactttaaaaaaatagattttaatttaaagtaaaaaatttaaaggcgcttaatgcgcctttattattggtaactttttgcgatgggcttggtgctcataccatgaatgaacacgctaaataaaattgttgttaaagttactgtagcaatttgctctttgttcgcaattgcagtgtccatcaccattaaagtgaatacgatagatgctaatcctcgcggaccaaaccaagcaaacgtgagcttgtcttttaaatttaaattagtaaacatcagcgaaactaataccggcacaattctaaaaactgtcacacttaataatgcataaaatacaattggccaagtaatatcattcacaattaagtgaccacaaacaaaaccgaataaacaccatataagtaatgctacaaattcagcaatatgttcagaatctttaactaatgttgaacgaatttttttaggtgctaagtaatcaaataaaagccccgctacaaatacggctataaacccactgccatgcaggttttgtgtcaaagaaaaaatggccatgaccaagccaattaataaaaatgggctgctattatttgcaaaataatgacgtgctaatgctacttttaataatggaataaatatggccattgacacgccggcaataacaagcgccacgcctaactctcgtgtaaaaacaaatagagtatcaagcgttgttacagcactttctggattttgagctaacaaaagaagaactaaaaatattggaacacaaagcccgtcgtttaaaccgctttctgtatttattccttctcgaactttttcaggtacagaagtacattctaaaatgcctttactaagcgccgcatcagtgggcgttaaaataatagcgatcaaggcagattgaaaaagtgacaactcagaaaagaaaaataatccgccagcaacacccaacattagtgtcattggtaaagcaacaaacagtaataggctagggtattgaaaactatgtttcaatacaggcagttttgattttgcagcatcggtaaataaaaaaatacttagggttaattcaaccaaaggtaaaatgtcactgagtccagcttcgcctaacttaaattcgctcggcaaaaaataagtcattgcgataccaacaaaaacaaaaaacattggaccagtaatttcagttcgctctagctgacgaattgtcagagaataaaataacagggctaaaccaacaatcgctagtattgtatattccattaaactttcctttttattccagactttgcgcgttcttttatatttgtttgaatataaatttggtctgttgtggcaattttggcatggcctaaatcttcagataaatgtttaagcggccttgtttgtgcatcgtgtgttgcaccggtatgtcgtaaccaatgtgccgtcgccgcttcaagttgctcagcatcatctttaaagccatcgtctaataaagattgttttgctaaatcaaaactttgttgaactaaacgtcgaatttgcctaacagtcataccacctttaccacgaattttatgaactaatggctccgattcatcaactcggggcagggcaggtaaaccacggtaaagcctataacgttttaaataagtgataaaatcttcacttaaagttacatcacgtaatttattacctttacccataattcttaaaaaccaaaagccatcattgtcttgccaaaaatgcgacataaccggcgaccactgtggtctttctgataactcagaaattcgtaaatacaatccttttaagcaagcgagtgtgaataaatttctttctaaattaggttgttgttcacataaatcccgggtaacaccaaatacatactcccattgaatatcactgagcgtatctggaattttaatctgtgattgcacaactaggtaagggctgttcttttttactaccggtacaaaattagcaaaggttttttcttctaaaatcgcaaacttataaaatacattaagtgcagtaaacattgcagcgagtgtttgttggctcgcaatattttctttatttatgaaggggcgccaatttgaatttaatcgcctaataccttgttcatctttataacgccattgcaccgaatctgataaccaagcagagtcgggatcaaccatgaaatctacataagcttcgatatcatctcgtttcagatcaaatactgatttttcagcaactaaccatgaccataaacaaaaacgttcaagctcatttcgaaagcgattaaacgttgcttcagatttcctgccataaacgtataagaattgataaacgaaacttaagtcattttttgattcagcaacagtcaatccaacctgatgtataaatgtatcaagttcaggatattctgttgcgagagtatcatcttcaagatgggcaatttggtagcgaagttgtttgagtgtatcaacgagagcaacgagcataatatataaatatcttgtaaaataactagttataagattaccataaagtccgatactgtctagtattggacttaacatatctgaaaattagtctattatataggtatcattttgccatacgagtattcaaggaattaagtatgaaaaagttattaatcattacctctgttattttaacaacgcttttaacgggttgtgccacaacaggtagtgcatcaccacaagaaaaacgtgcattagttcaaagcatgagaactaatacacttaacaaattatatgcagaaaaacctgatgttaaacaacaaattgcaaattctgcaggttatgctgtttttgataacgcaaatgtaaatgttgttttagcgagtttcggtggcggctatggtgttgtaaaaaataacctaacaggccaatcaacttacatgaatatgggtgaagctggtttaggtcttggtttaggagtaaaagactttaatgtagtaatggtctttcataaccagtctgcattaaatcgcttcattgaacatggctggacctttggtggtaacgctgatgcagccgcaaaatatgaagataaaggtggagcattagttgcggaagccattgctgatcaagttactgtctattcattaaccgaaaatggccttgctttgcaagctgtactaaaaggcacaaaattttgggtagattctgaactgaattaactaagtaaagacccttctaaaagtgggctagttagtaacctaacgtccactttttattattttatccaatttaacataacgtaatttatgggatgttattggcattttaatttttaagtataattattccatcaaccaagcaatcaacatcatctacattttaatgtgttaatcatttcatctgtgttcatagatgaaatagctatgtttctacctaacgttaaaaacctaaattttaagcaatctattacctcgcataagttcagataagaatgcctttgctgtgcaatcaagtttctttactgtttattacactctattgagttttttaaagtaatacagctttaaaaatgctacaaaaatagcgctaaatgtcagcgaagctttcaaaatttcaccaatccttttaaaggattggttatataaatcatgatagcaacgtataaacaaacatcaaatccaaaataaatactataagaaagttcatattttataaatttccaaccttttatctttctgatttatcagtctgtttttaaagttttattgattttaatacttgctataaataaaagtgtatatatccgatttctaagatatttcagattttcttattttcagcgaatacccattaaaaactcagtcgtttgcttttaatatgtattacaaccttaatctcgattttataaatattactatccattttttagtatcttcaacaggagctcatatgagaaaaattttcttactaattgtaattgcttttggagcttgggcattctatgcaaataattacggggaaacttctgctgtcgacacaatacagcagcaaatcattgagccaattcaaaataaatatacgcataaaagacaaactgatatttcacaagaacctatctatacatgtgatggtaggaaatactgcagtcaaatgaactctctagaagaagctgttttttttatgcgtaactgccctgatacaaatttagataaaaattttgatggtattccatgtcaggatgaaccaaggttacataaccgctagtatttaaatataataaatcttgctacaccaacggctcttgttggtgtagttaaataaccatctccgagcatttaaattctagtcatttaatctaccaaaaattccaaaattcaacgttaaataaagctaaaatttacttaaagaagcttgacacctatgatttaagtaaatcacttttcaatttgtaatttttttaatgttgtgtagtttatattaatctaaataattcaacaaatgagaaatttcctacttctttcgaatcaatttaccgctacattatgtaattaaattcaacaacttgctttaaattgagtttttagtaattaattaaaatctcaaatcttagtgtagtttcttgtacaaatacctcctctatttctgatttggataatttaaacgtgaaaattgataaaacaaacaataaagaagttaaattttcagattctgacattttgctttcaactaccgatttagatagttacataacatatgcaaaccaagagttttgtaatatttcaggttttacattagctgaaatggttaatcagccccataacctagtacgccacagcgacatgcctaaacttgcatttgctgatttatggcaacacctacataacggtagatcttggatgggccctgttaagaatcgctgtaaagatggtagttactattgggttaatgcatttgttacccccatcaaagacgccagcggccaaactgtagaataccaatctgtacgtacaaagcttaatgatgacgttttagctagagcaactgaagaatacgaaaagattaataaggtttctaactcaaaagcactgaaacagccttttgattcaactttatatttatcatggtctttatttttaactttaattctttcttttgtgcttttatttacaagtgggttttctgcagtatctttattattactttgcagtttagtttcaataaatctaggtttgtttttttggcgaatgaaatataaagcgctcatacaaaaagcaaaaagtatttacgataaccctctcatggcttatttatattctggtagtaatgatgaaattggttttttacacttagctcttgaaatgcaacaagcaaagttaaaagctgttgttggtcgagttaacgatgtgaccatgggtgtaaataacaatgcccagcaatgcgctgattctgggttagctgtaacagaacttttgaccaaacaaactgatgaagttgcgcaaattgttgttgctacagagcaaatgactgcttcaatcaatgaactttcatcgagtacttcagcgtctactcaagctgctgaagcatctaaaaaatcaacagaacaaggagtaacttctgttcaccaaactattgattcaattagtgaattagacaaaaaattacacattgcaagtgaacaagtggtcgaccttattgagggaaataaacatattgttgcaattttgaatgagattaatgcaattgctgatcaaacaaatttattagcacttaatgcagcaatagaagcagcaagagcaggtgaacatggacgcgggtttgctgttgtcgcaggtgaagtacgtgcccttgcctatcggactcaacaatcaacagaagaaattaaaactgtcctcaatcatttaactgaggcttcgcaacaagcacagcatgcgatgtctgatggccttgctttgtcagctaaaagtgttgaacttgctcatcaaagtggtgagagcttagagcatatcaaagcacaatcagtgaaactgagtgaacttaacagcattattgcacacgcaatgactgagcaactaacagcaagtcagctgattgcaacaaacataacctcagcacaagaatttactcttgaatgcactgagcttggccatacttcgcaacaactctgtgcagcattattgaacaaggttaatgaacaaacagcgctagttaatcagtttaagtaataatttgaatttttggctctatagggtgctcacaaagcttaacgaaggcttcgccaaggcgctctgtttcgctgagcacttgtcgccagtatttaatacgtgtgtcagcatcgagttcggtgaagtcagttctatcggggatcttgccataaggtaatgacgcaataaactcagctgatggggtgatcataactactttgtcatagttttttggtgtaattccgcgctttaaacttttatcaaaccaccctgcttttggtttgttattaaagtgcggatacaagataagcccatcattatgaatatttaaatcaaagtgataatcgatgataccaccatcacgatacatccctggtggtgttcctgttatatttttaataccttgcatcactaacggaatagagcctgaagcaagtaaagcatctgctaaattatcttcgtttagctcaatagtatgggtattgaaggtattgttatctgaaaatgataactggctatctgaaggttgaaacacataacgctcatactgtttgtttaaaaagcgtctgtttaatctattcgctaagtaacttttagataaacccattaactgcatcagtttgttttctgaggctacaaacccattcgattttgcaacaataaagtgggctttaaaaacggggttatctatgatttcttgaatgccgttttcagcaaaaacagtgcttaataactctcgtgcttttgtcgttatttcttcaggctttgctttatttgatgaataacgtgtttcagagtatgactttgctaatcgcgatattgctgcaacggggtcattttgagcaaaacacgcagctctaaatgcgccagcgcttgaccctaataagtttaatgttgtgtttcgctctttaaaaaactcaccaaacaaatatttatcaagaccaaataatgtaaaccattttggaccaccactcgcccctaaaaatgtgctaaataggtctggtatcattccttgttctttaatcgcttttgctgcgcttgggcctacgtaaatatctatcatgtgcaactgctttttggttattgttatcggttattttcgccaaatgcccagttccgtttgtccttgtacttttactttatcagaatcaaaactaggctcttgtcctgcttctcgttgactatggtagtctttagtaacagataagatagttggcgttaagcgtatgatagcgataacgttcaccactgtcattaggccaagtgctatatcagcgagatcccatacttgtttaatggtcgccgaggcgccccaaatcatcattgataaatataaactggtataaatacctcgaccaagtttattatctagcttaaataaatgcaggttactctctgcataggcatagtttgcaaccactgaagtaaacgcaaataaacaaatcgcagccgctacaaagtaaatgccaccagcggccatgtgtgctgtcatcgcagattgagttaaacgtattccttccatttcgccgcttatatcaatatcagctaatagaataatgacggctgtacaactacacagcacaatagtgtcgaaaaacacccctagcatttgaatgtagccttgagtgaccgggtgattgggtactggtgatgcacagcctgatgcgtgtggcacactaccggcacccgcttcattcgaataaagcccgcgctgaataccgtttttaattgctgcgcccatagctcctgcgcctgcttcttgtaagccaaaagccgacagtaaaatatcttcaatcatggcagggactttgccgatatttagtaaagtaattatgatggcggctagaacaaataaaatccccatcactggcacgatacgttcagcaaaacgggctatagctttaaagccacctaaaataattgagcctgccagtattgtgatcacaatgcctgaatacaatgttggaatttcgaatgcgtaattgagggcatcagttatggtatttgtttgcatggcactgaaggtaaagccataaccaagaaacaggcaaaaagcaaaacacaccgccagtgctctgctgcctagcccttgctggatataataagctggcccgcccctaaactcaccgttggcatccctgactttatacacttgcccgagtacgctttctgcaaagccagtggccatgcccaaaatggcaatgacccacatccaaaatattgcgccactgccacctaacgaaattgctacggcaacgcctgcaaggtttcctgtgcctactcgtgcagaaaggccagtacataaagcttgaaatgaactgattgagtttttatcggtgctgctactcgactttaacaagctaaacatatggcgaaacttaaccaattgaattgcttttaagcgtaccgaaaaccaaattccagcaaacagtagaatataaataagaatttggccttctccccagagaagaccatttattgtcgataccgcagtgttaaacatggcaagcctttattgttcttttagataaaaaatcacaaaaagtgaatagctaaccactttaactttatttacgaatatctcaagtaggcaatgggattaattaactgtgcatgctaccgactaatttagcagttgctgctgtaaaaaggcacgacctgccgctaagcctaatttgtgatcaaagcgcagatctgaatctgtactacccagcaacttactgcgtagtttatcacctgcaaaaatttgcgtgatccgcgcatcacttggtgggttagcgataaagtcgagttcgtcttgataagcttgttcatgctgaactaagtaatcgattgttttagggcaatagccagaaacgcgaacaaatgatttaaatttattcacccactccgactgaatttgaaaatcttggtcaacggtacgaattactacaatgtcccgtgcaccacgattataagcttctttaactggcaaaggtgctgctaagccgccatctaaatacatatcatgaactaaatcagtattcgaactttgaataatagcatcattagccgctttggttgtcatccaaggcgttaagttcacaccatctttatacaaaaacggtaaagcgcttgatgcctttaacagtgctaaccattgcgtatcttctccatttgggctcaagtaatacggtttacgatctgctgcatttgtggttgtgatcaacagttcgcgattacctaaactttgagtcgcggttttaaaatcaagggcacggttcacttctttggttttttcaaaataccaatcaagatcaacgatgctttttccgataagacctcggccaagttgaaagaaacgcttatggcgcgaaagacctctaattaaacgctttgcgtagcctttttgacgcgctaaataactcgttaaattttgtgaaccagctgatgtaccaatgaataaatcgaatggatcgtaattattttctaaccatgcatcgagtacacctgcggtaaaaatcccacgttgcccaccaccctcagcgattaatgctgtttttgtttgtggctctactgcggcaattgtttgagatttcacggtgcaccttcctagggttatgattaataaatatattgtattaagttaaattcaatccttaaaacggaataattaaatcaattcaatctaaaaaaccgtttattaaataagtaacaagttttttaaaggcgcgtaatcgactaatcacgcgctcaagtagtgcaatggctgtttatttcataatacctgctagtatttccagcgcatgctgcctgtcactcaattcatacaggtcattagtaaaaatgaactcatcaacctgtagcgtttgtttaatcatactcaacttatgcttaacgctcgcttgaccgccaacaactgaaagccctaaaaagttctctacttgcattttttcttgtgctgtccataacccttccatagtttgaactggctcttttagccaaagtggcttgccacgcataagtgccaaaatacgttgttttgctgtggttgctaaaaactgtgcttgttcgtctgtgtctgctgcaacaacaggtaagccaagcatcacatatggcttatctaacacgtcagatggttgaaattctctgcgatataatgcaatggcatcttcaacaaagcgcggtgcaaaatgccctgcaaatgcatatggcaagccttttttagctgcaagctgtgcactataaaggcttgagcctagtaaccagattggtacattagtgttttcacctgggattgcgcgtactggagagtcacctttatatgggccaagtaaaccttgcagctctgtcacttcatttgcaaagtgttctgccctttgctcgtctctgcgcagtgcgcggctggtaattggatcactaccaggagcacggcctagacctaaatcaatccttcccggatataagctttcaagggtgccaaattgctcagcgaccaccagcggtggatggttaggtagcatcaccccacccgcacctacgcggatattctgagttttacctgctatatggccgatcagtactgaggtggctgcacacacaataccacgcatattatggtgctctgccatccaaaaccgattaaagccaagcttatcagctgtttgcgcataggtaacactgttagcgagtgtttgcgaaactgtttcgtgctctttcattgggcttaattcaagcaatgaaaaaggtgtatttgtaaggtctgacatccgctctccaaaatttaactctttatagttagttaatgagagcgaatagctatttttcaaatgctaattaggcacggctttgttgctgtttttccacctttaggccatcggcatcaataccacgcttccaataggcagatgcaacaatgtgctcacggttaatttcaaaactgcttgttaataaacggcgaattgcttttaccaagcttgcttctagtgccataaacaccattggttgcgtgttataacctgcacataagcgtgttacttggtcgagtaaatctgtttctggctcatctgtaactagccattcaacactatgttgagtgtgtgctttaatttgctcaagctcaataatatcggctttatcagcaacatgaataatgacatcgacagtggcatcttgtggcagtgcttgtaaatagccattgattgcatttacagaggttaaatctgccaacattaaataatgtgtttgcgtgaagtctgtgagttttttagggcccgggcctgcaatacccacctcgtcgccaactctcgccttttgtgcccagttagttgccacaccttgatgttggttaaccacaaagtcgagagtaattgcaccgttaacagggttaatttcgcgaatcgtgtaagagcgcattaatgctgggtgttcagcgtgtaaatcaagttcaaccttagattcaccggcatgaggtagtagtacctttacgtacgcaccttttgcgtcttgtggaaaatcggcaaactcgtctgagccaacgacaatcctttgtagatgcggggaaatacgtgtagtacttattacgtttgcacgacgaacttttctagccatgttggtctcctagctggttaaattgcacaacgccccaatagttgatatagtcaactatacgcttttgattgactttgtcaactaatgctaactagcttaatttaggtgaaccatgccacaaacctctctttcttctgctttatttacactggcacaaagttatcgcgtcactgtacgcaaagccattaacgccaacgagctgggtcttaatgcactacatgtccgctgcttacatattattgccgaaacacagcactgtaccgcgaatgatattgttgccaaaacggggcgagataaagcacaaatagcacgcttattaaaagagcttataaaacttgaactggtttctaaatgtgctgacgataatgataagcgctgtttaattttatcgtttactgaacaaggtaacgctctgttctcgcgcttagaagttgctgagcaagaggttgatgccaaactttgccaaggtttaactgatcagcaagtacgtgattttatcgatatagccacaaccatgatcaaaaatatcaatcacaacaccccgtgatcttattggcaagataaccacaaaccactatactgtacaaacatacagtatagtggttttgttatgcgcgttattcctatttatatcgaagctggcgtgtgtggttttgaatcaccagcagcacaatacaaagagcttggcctatcattagatcagctgttgattaaacaccctgatgcaacctttattggtattgcctctggcgaatcaatgcaaggtgtggggatttttgatggtgacttattactggttgatcgcgccgaagatgttaaaaatggcgatgtcatcgtggcgaatctaaatggtttatttgtttgtaaactactagataaacacaatgcccagttattatcagcctcgcctaaataccctgcagtgcaactacgtcaatctgatgaatttcaattagaaggcgtggtcacccgctcaattcgcttacatcgcagtagtaaagagctattagcatgtacgccttagtcgatgcggtggccttttatgccagtgccgaaaaagtatttgatccagctattcgcagtaaacctgtagtggtactcaccaacaatgatggctgtatttgtgctgtgtgtcctattgcacgaaagctagctattccaaagtttcagccctattttcaggtaaaacagttactcgaagataaccaagtggtgatccgctcatctaactatgagctgtatgcggatttaagcgaacggatgatgaacgtgattggccgtttttgcgataatcagcacatatactctattgatgagtcgtttttaaactttacaggtttcaacaagcttgttaatgattggcatagttatggtcatcatattcgccgtaccgtatggcgcgaaacaaaactgcctgttggagtaggttttggcccaacggcaacccttgccaaagccgccaatcatgcagcaaaaaaattatcgggctttgatggcgtagcagtgattgattcagaagcgtcacgaatagccattttaaaagccatggatgtacaagatgtttggggggttggtcgacgcttagctaaaaagctcaaagcgatgaatatcaatactgcttttgatttagccgaacaagagcctcgaaaaatgaaacgcctgttcagtattgtactcgagcgtacagtaaacgagttacgtggtaaaagctgtttagcatgggatgacgtgcgccaagataaaaaagagatattttcgacccgtagttttggggaacgtatcaccgatgccacagcgctaaaaaccgcacttattaatcacgccgttattgttgcccgtaagttacgcacacaagggtcactcacacaacgtttattaatgtttgtcgccagctcacctcatcaagatggctattataaaaagtcctatatttatgagtttagtgttgccacagccgacagccgtgtatttgctaacgctatcagcgaagtctttaaacacttatataaacccggcgtacccttttacaaatgtggtatcggtgcgctagagttatcgagccaaatgtttcagcaacctgatttatttcaagcacctatcgataacccaagcctaatgaaatgtttagacaaaataaatgctcgttacggtgttggtacgcttgcccttgcaagcgaaaccacaaccactcgttggcatatgaagcgagagtatttatcaccgcactacactactcgctggcataacctaccaaaaatacactgctaaaagtaatggaaaagctgcaatttaaattgctgttcagaacgttgccaatcttgataaatagctgagcttctaagcccccaattctgagccaacgctatttgccaatgagcagaaaacgttagctgatagtcaacacttggttcattcatcagccaaaaagcctgaccactcaaagcaagcttttgtgaatcggtaacttgccaaataacacctgcttcgcttcctagcccaaacgacacagaatctatcaaatcacctgattgaacaactgatgagccaagcaaataactttgcaagtgtgatgcatcaccaaaagacttgccatagccgccttgtaaaaacagacgaccttctcgcttcgtctgtgttggttgacggtcaaacccagcacgaacattccatgaccaagaattaaataagccattgtcaggtgctaatgacattgcatcaattaaaagcaaacgctcgagatgaagattctcgttactaccttggtttacctctaagtcaaaaaaactaatttgcgcaccaggaataaaaccaccgggattatcaagtaaatcatgataagcaacacgatatgttaaaccaaaccgactagcggtatgctcataatcattaaatattacaccaacacgactagagccatgaccattatcaggactcactcgaggctttggcgcaggcttgaaaggcgaaaccacatggaattgactgcgttgatgcaacagctttgttaatcgaggagcaattgcatcacgtgctaatccttgatcataatattggtaatttaaccactcatacgccatctcaaggataggcacagcctgctcaggtgtgagcgataattcatctagcgctactccatcacgcagtaaacgagcaaggtaaacctgctgctctgtgagttggctttcataattgatcaatttagtgcccgatgcagcacggtatcgaggcggctgtaataatccatgttgcttaagagctgcaaccgtatctgatgggatcgcatgcgaagaaaatggagcagttaaagacaaatcatctcgtgcaagttgcagtaatgctaacagctgatacgagcagttttcatcaacaaaaaaataatcaaacgtggcccactgcatttcccataaatgtaataacacacgctgaatttcttgttcagataatgagagtttatattcccatatatcacgagattctaagtcattatattcacggactttgcgataatacggcattaaagtgaacttacctggatattgaccaataataccttttaaagcatataaagcggcattatcagtaacatcaggctctgcagcaaagttaacagcaaaagcgatgagctctctactgcgggtttggtccttcgcatcaatacgtaatagagtatgaccaaacatcgaggacggatcattcataaacgcggtcgggaagactagagtcataccttttgggttgataagctgttgccatgtttcaatttcagggcaagaaagtgcaggccaatttgtaaagaaatgttcttttagccagttatagcgagcaggaaaacggcactttgcttggttatcatcatcgctgttaaacgccgctatggtcgctaaaagctctgcatgagggtctgtttttcccacctcagaaaagaaaaattctgagctatccacttcactttcatacatagaaagaaaaggctgattataatgacccagcttaagccaataaggatggtgagctatttcgagtgtcggtgttgttgaatatgctaaacagctgaataacaaacaagaagaaaataaaataccacgcataatagaataaaagcccattaagggctttatatttaaaaagtacacgctagattaagatagtgtgtaagtagcaagtagcgcatcgctagcaacaagcgtattaaggttctctaaaactaattgagatgtcacattttctgatgtgaatacgttagtaaactgtgtttgtactaacttattgaatgctgctttatcttgcgcttgaacgccccatacttcagccagcgtatcaagagtttcaccttcgccacgtgacatatcacgtgcaagttgttccatattgccatcaatgaatgtcgcaactttagttgaagctgtcactgtaccattaccgttacagcctaaagtaccaaatgtaataccaaatgtttggttacctgaaataccatttgtcgttgcaccaagaactttaacaactttaccttgttgaccagcaaataacattgaacctaaaccacaaccgatgtcttgatcagccattgcatttgaaagtggaagtagagaaagtgcagaaatagcaataatttttttcatatcctgaatcctttaagataaatcgttattcgaattaataacgcattattagcttagctagattcagattaaggacaaactcttttttaaaaaaaagtaaaattagttacattaaatgttcaaaaatcaaccaatctagcatttaatagactacacaagtcatggggcttaagcgcaatttcaaggcctcgcttaccggctgagacatagatagtatcgaaatttattgcagattgatgaataaaagtaggtaaacgcttcttttggccaagcggactgactccccccaaaatataaccagttgtgttttctactttctgctgaggggccatagttactttctttacttttgctgccttagcaagcatcttcatatttacctgttgactcacagggactactgcaaccaaaagctgttgttcggcatcttcaaggactaaagttttaaacacttgctcagcgggcaagttaagcttttcaaccgcttcaaggccaaattgggtatgtgcaggatcgtgatgataactcagcacatcataaaaaatacctttgttttttaataaattgattgcaggtgtcattaaaagttcctttaacaaaaaagcgcctgaactttatcaaagttttgggcacttggcatagtaagacaatacaggctttgcatagtaaatatcccgaaaaaccacactgataagctacactaaaagtatgagcaatagataaagcgtggcaactatgtcaaaacacattagtctctatttggcgaaacaatgttttatcatcatcacactcttgtattcaattaattttgtttgtaatgaatacgtagcatggaccgcgtttatagattgccaaagtaaatgcgaaacactaggaatagaaaaaggtcagatccaagaaacaacctttaaggacgatgtcatattatgccgatgcctagctgaaaatgattactacgtagtactaaactgaatctgaaaatacccactaggaattaaaaaaatataacgtattatgaattcagtattagttaaggaaaggaaactacatgtttttagactactttgcactagccatgctagtgtttgtgaccgtcgtaatattttatggtgtgatagccattcacgatattccctacgaaattgccaaaaaacgtaatcacccccaccaagatgccatccattatgcaggctgggttagcctatttaccctacacgtactatggccatttttatgggtttgggccaccttgtggcgtgatgaccgcggctggggttttaaccaaattcaaaaggaacaagaagacttagctgagaaagtggctagcctgacagccacagtggcagcactacaagcacaaattaatgctcaatcgaataataaagagaaatagaatatggatttgttattaatacttacatataccgcattgtgcattggcatcttcaaactctttaaaatcccccttaacaaatggacagtaccaaccgctgttcttggtggtgtagtactgatcggcgcattaattctattaatgaactataaccacccacattcaaatatggcgagtagtgcgtatgttacaacgccgattgtgccaaatgtgcgtggtacagtagaagaagttgcggtaaagccgaatcaaccagttaaaaagggcgacttattgtttcgcctagacgacaccttatatcgagcaaaactaaatcaagctattgcagctttacaagatgcaaaacaatcggtacttggtttagaagctgcctataaatcagcacaagccagtgcgctgatggctaaagctgaatatgaccgtagtaagaaagaatacgaacgctatgaaaaaggcgcaaaaagcggcgcctattcaaaaggtcaagttgataataaattaggggtgtatttagcggcaaaagcaagttacgaagcaacacaagccgaagagttacgtcagaaactagcatttgagtcagaaattaacggcgaacaaacaaaaatagccgctgctcgcgctaatttagagcaagcccaatttaacttagacagcactagtgtgcatgcacccaccgacggctatgtcacacaactgacattacgtccggggatgattgccgtgcctatgccactgcgaccagtaatgacctttgtgcataaagaagacactgtttatgttgcggcatttcgacaaaattcattattaagactcgaacctggttataaagctgactttatctttaaagcaattccaggcaaaaccttcgctggcgaagtaatcgatgtgttacccgcaattggtgagggacaagtacaagcacaaggcacactgatgggcactgaattttttgcccgtcaaggccgcgcaattgttactttaaaaatcactgacgacatgagtgaatatcatctgccacaaggaacaagcactgaagtagctgtttattcagaacattttgaacatgtttctgtgatgcgtaaggtgttgatcagaatgaaaagctggcaaaactacttattcttagatcactaaactcaaaattgaagcgtaaaaaaaggcgctgattagcgcctttttactatctaactcaagttacttaactaggagttacttagttagatcatcgaagaatttcttcacaccgtcaaagaaacctttttcttttggacggtttttagagccatctttacccatgctttgctcaagctcttcaagcaattcacgttgacggtcatttaagttcaccggtgtttcaataaccactttacagattaagtcgccttgtgcgccgctacgaacagacttaacgcctttaccacgcatacggaacattttgcctgtttggctttctgaagggatcttcagttttgcgcgaccatccaaagttggtacttcaatttcgccacccagtgccgctgttgtaaagccaataggtacttcacagtacagattgttaccatcacgttggaagattgggtgctcacgtactgacacttgaacatataagtcacctgccggtgcgccatgcatccccgcttcaccttcacctgataagcgaatacggtcacctgtatcaacgcctgctgggatcttcactgataaggtcttcgttttttctacgcgaccttgaccatgacagctgtcacatgggtcagaaataatttgacccgtgccctgacacgtaggacatgtttgctgaaccgcgaagaaaccttggcgcatttgtacttggccagcaccgtgacacgtagtacaggtttttggcttagagcccgcttttgcaccgctaccgtcacatggtttacagctaacccaggttggtactttaatttcaacatctttaccacgaaccgcctcttccaggcttaagtccatgttgtaacgtaagtcagacccacgttgttggcgcgattgtcgacgaccaccgccaccaaagatatctccaaacacatcaccaaaaatatcgccaaaatcaccatgaccgccgccgaagccaccgccatgaccaccaccaccttgttcaaaggctgcatggccgtattgatcatacatctgacgtttttgtggatcagttagtacttcataggcatcttttacttccttgaatttagtttcaaggtctttatcacctgcggtacggtctggatgatatttcatcgctaagcgcttatacgctttttttatgtctcgttcgctggcatctttgctcacgccgagaacttcataataatcgctttttgacatatctatcacactactctttttactgcagttacactgcgtaaggtaagtcgaacgactttaccgttcatatacatgcaaaaggcgcgtcaagcgaaatcgctggcgcgcctcaatcatttcatcctaacttaattggctaaacaaagcagccattatcgcgttaggcagaagcgaaacgagcaattacttgtcgtctttcacttcttcgaactctgcatcaacaacatcgtcgtcttgttttgcagaagattgctgtgcacctgcatcagcactaccttgttgttgtgctttcgcttgcgcaatttccattagcttttgtgatttttcagcaagagcttgtgttttcgcttcaatctcttctttcttttcactcttaatcgccgcttctagctcagtaagggcagcttcgattgcttctttatcttctgctggtaatgcatcacccgcttcttcgatttgcttacgtgtaccgtgaaccattgcatcagcttggttacgtgtagctactagctcttcgaattttttatcttcttcagcgtgtgcttcagcatcacgaaccattttttctacttcttcatcacttagacctgaagaagcttgaatcgtgatcttctgctctttacctgtatctttatctttagcagatacgtgtaagataccgtccgcgtctacgtcgaatgttacttcgatttgtggtgtaccacgttgcgctgggcggataccttctaggttaaattgacctagagatttgttatcgcttgcacgcttacgctcaccttgtagtacgtgaatcgttaccgctgattggttgtcttcagctgttgagaatacttgcgatttcttagtaggaatcgtcgtgtttttctcaattagtgctgtcattacttgacccatagtctcgatacctagtgataacggagatacgtcaagtagtagtacgtctttaacgtcaccagctagtacaccaccttgaatcgctgcacctactgcaacggcttcatctgggttaacatctttacgtggctctttaccaaagaactcagcaactgttttttgtactagaggcatacgagtttgaccaccaacaaggatgatgtcatttacgtcgcttactgataaatcagcatcagctagtgcacgcttaagtggctcgattgacttagttactaagtcttcaacaagtgactcaagttttgcacgagtaactttaacgttcatgtgcttaggaccagttgcgtcagcagtcacgtacggtaagttaacttctgtttgctgtgcagaagacagttcaatcttcgctttttcagcagcttctttaacacgttgcattgcaagtgggtcgttcttaaggtcgataccttgatctttcttgaactcttcaactaagtagttgataacacggttatcgaagtcttcaccacctaagtgagtgtcaccgttagttgcaagaacttcaaacgtgtgctcgccttctacttcgtcaatctcgatgatagagatatcgaaagtaccaccacctaagtcgtaaacagcaacaacgttttcacctttgtttttgtccataccgtatgcaagtgcagcggctgttggctcattgatgatacgtttaacttcaagaccagcaatacgaccagcatctttagtagcttgacgttgtgagtcattgaaataagcaggtactgtgattactgcttctgttactggctcacctaagaagtcttctgctgttttcttcattttcttcagcacttctgctgaaatttgtggtgcagcacgtttttcgccacgcgcttcaacccatgcatcaccgttatcagcttttacaattttaaaaggcatgataccgatatcgcgttgtacttcttcgtcttcaaaacgacgaccaattagacgcttgatggcaaataatgtgttagttgggttagttactgcttggcgttttgcaggttgaccaactaatgtttcaccgtcttgcgtgtatgcaatgatcgatggtgttgtgcgatcgccttccgcgttttcgataacgcgtgctttatcaccgtctagtactgctacacaagagttagtagtacctaaatcgattccaataattctacccatgaatcttctccaacttcaaaattcgttaaaacgttcgatgactagtaaataggggtgcaggaaactgaattcaactgtaaaaatgaaaaaaatttacttttttttgaaatattttccaaatgggtattttttcctcaaaaagaggggttttttaacacttctagcaatacaaacaaactggtctgatgactttagctgtgctataaccttgtccatagcaataaatgttaaggaaaattatgcattttgatcaattactcgccatggcaacagaacttggcaaagacaaaacaaaagtaatgcagtttccagaaaactggtgccaaggtcgcactgcgtttggtggtttatcagcagctttattatatcaagcaattcgtcaacatatcgacaactcacgtcgtttactatctttaagcactaactttgttggtccgttaatcgctgactgcgacttttcaattgatgttgaagttttacgcgaaggtaaaaacagtgcgcaagtacttgctaaagtaattcaaaatggcgatgtttgtgtcatcacacaagcctgttttggcgctaatcgagaatcagcagtacgcgtagatgtgtcaaaaagcatgcagcttaaaccagtagacgaacgttttactctgccttataaagaaggtttaatgccggcatttttccagcacgtcgcgctatgcttacaagacggaaatatgccattttctggcgctgacacatcacatttaggcggctggatgaaatttaaacataaaccagaacacatgagcgaagcgcatatcattgcccttacggatgcatggccgcctaccttattacaaatgtataaacagccagccccagccagtagcatgtcgtggtatatcgagtttgttgaagagccaaacatcgctgatgatgcttggattggctatgaagctgttacacatcatagtaaagatggttacggtcttgaagatggctgtatttggagtgatgatggcaagctcatcgcactaagccgccaaactgttgctttatttgcgtaattcatggctgcttatttgcgcatattcagtgccatcaaggcgaattatcgcttgatattcgccagattctacaatttggcctagacctgtattaaaggtatcctttaaaacttcactattgaaaaatgcaggtcgaggtgcttcattaaatattggatgcacaacgaaaggttttatttcggctgtctgcttatattgctcaagataatataaaaaaacacgtctttcgagaatgataacgtcaacccatcccttcattaaatggtcaacttgtgcctcttggtttactacctcatcataagaacgaagtatacgtgtcaccgatttgaaaggtgcttcaataaaattggtcgcattttgaaaacccagcacacttttaccagctaaatcataaatgctgtctatttttaaattttgttcagccaaacttatcgctacattttgatagcgtaatagtggttcactttggtaaatattagtactcgctccagaagcgaaatttaaagctatatcaacttttccttgcagcaactgctgctctacacgcttgtttggcatgtattgcacaacaatgttactgatcccttgagatttaaacgctgcttttaatatttctaattgaataccactgtcgttatctttaataacataaggagggagataagaactggctgcaacaacaatagggtcttctccagcttcctctgataaacatagccccttacaacttacaaacaacaaaaggataaaaaaatgtttcactacacaccttaatagacagttgcatagttaatctatgcgcctttgcgtaaattctagcctattttaggaaagggtgcatttgaatttatcgagttattgatgcaaactaaactaagttcttgtttatgagaccctaagtttgcaaacagcctgtcctagctgcgaccttgtcgttgagatcccacatttaagtgcgaaacaagtagcggtttgtcctcattgcaaaaccaaactgtcttcttcgcaagcaaatcaagatagtgctgtcgtagcgctgagcttaagtgcgatcttaatgctgttaagtagcatgttttacccgtttttatctttttcaagcagtggcatcacccaaactataaccttacctgatgcggcacgtattctgtttaactacgacaatgactttttaggattattcatagatatcagcatcataggcttacctatgttactgcttgtgctgataatcccattacatttagggttacttaagatactcccttatcaatgggggaaaaggctcttaaaaacaacatttgcactgcagccttggattatgtcagaaatatttttaattggtgtcatggtcagtatggtaaaaataatgtcgatggctgacattgaatttggtgtgagcttttgggcttatggcgcatttgttattagttatattgccactactgctaagctcaataaacaaaatctatggtatcaactcaaagagcctgtttttatagagcaaatcaagccgaatactcgtgcaatcgaccaaggccttagggcttgtcatgtatgtggtcaactatgcgacagtgaaatctgttctcggtgtgaatcaaaaacatactctcgtaacccttttagtgtacaaaaagcggcagcatggctgatcacttccgttgcctgctatatacctgcaaatatttacccaatcatgtacaccactagcctaggtgatgaaaccccctcaaccataattggtggggtgatgatcttgtggaatagtggttcttatcctatcgcaatgatcatctttttagcgagtgttgtcgtaccacttgcaaaagctctcattttgagttttttatgctttatggtgatgcagccggcaaacaggcaaactaaaagctacacacgaatttatcaattaactgaatttattggaaaatggtcaatgatcgatgtatttgttgtggcaattttagtagccttagtacagttaggaaatttgatgtcagtaacgcctggtataggaactatattctttacaacaatggtgatttgccagatgctggcagcccatgcatttgatccacgtttattgtgggattcccctaataacttaaataaagtaaaacaagagaccttggcatgagcgaaaaagcaaatataaaaacagcgccaaacatatcggcaatctggattattcctgtaatcgctttattcatcggcgcatggatgctgtatcaataccaagcaaataaaggtacaacaatctttatcaaaatgccccatgctgaaggtattatcgcaggcaaaacagaaataaaggtacgcagtgtaaaaattggtcaaattgaccatgtaagactctcagatgaacaagatagtgtaattgcacgagcacaaatagataaacactatgaagaccttttaacggatgatgcgaaaatttgggttgttaaaccacgcattgatgataccggtattagtgggatgagtaccctattgtcgggtgtttatctggagtttgctccaggcgaaagtaaagaaacatctgagcgatttgaactacaagatgaacctgcgctaattgccaatgatgtgaaaggaggtcgctttatcctccatggctataacgctgaagtgctcgatgtgagtacaggtatctattttaaggattacaaaatcgggcaaatagaaacggctacttttgattggaaaaatcaagccatgaaatatggtattttcattaatgagccttatcaaaacctgatcacgcttaattctatcttttgggttaactcaggtatacaaattgatttgtctgccgatggtattaatgtcaatacgggctctttgagtaagttacttaaaggagggatttctgttggtattcctgagcaacagaaaccaggggaaattgccacaaatggccatagcttctcactaagtaatagctacaaagctgctcttgaagagcgattttatgactttgattattatctaattgactttgaacaatcaattcgtggattacgtcctggtgcgccagttgaatatcgagggatgcgcatcggtactgttgttgaagcacctgcaaatgtcattataaatggcaaaccagcccactttagagtcgataacactgcagtgcccgcgctgattaaaattgagtatggaagactctaccatgacaatgttgcagccagagagttctggcagtcaagtttagatggctggattaaaagtggtttaagagcctcattaaagccaggaaacttattaacaggtgcagtgtatgtggacttggacatttatgataatgctgaacctgcagaattaacaactattgctgactatacagtattcccgagtgtttcaagtggaattacagtcattgctgatcaagtctctgatgtattaaataaagtcaataatctcaaaatcgaggacagtttggcacaaatgcaaacgacctttgcagaataccaagcacttgcacatgacatgcgtgaattgcttaataaacaagatactcaagacttaccgggagatattaatcgcaactttgctgagatgaccaagagcatgcaacagttcgataagacgatgaagcaatttgaaaaaaccatggcaagttacgaacaaggatcaacattccatgagcaattacaaacaaccttgtctgaatttaaacgtttaagtgaagagctacaaccacttacacgtggtttaaaccagcaaccgaatatgttgatctttgataaagagctacctgctgatccaacgccgaggaaacaataatgaactttaaactctgtgcttcaattgcatcagtgctgttactttcggcctgtagccaaacttcattctcaaccattgagtattatcaattttcgcagccgatagaggcaatgcaacgcttagcggagaatacccaagctcagctcagaattaacacagtaaagttacgtggtgcgctaaataatcgtggtatcgccatggtgcttgataacaacagagtgaatgctgctaactatcatttatggagtgaatctcctgatttgatgttaactgccagtgctcatcaacaactttacactgagcttgctaattggatggtaataaaaggcttacctgtaataaccgatttagaccagcaaagcttttatgaattagagtatgagctacatcactttaacggtgatgagcaaggtaatgccaacattgcagggctttggcgcttgtactatacaactcctgaatctggcagaaagttgaaggcggtcaattacttcaatgagcttacacctttacaagcaagtgattacgagggacttgtagccacacttgagtcaacttggctaaaggttaacaaacaagttgcaaacgaagtgtcaaagcttgctatttaataagagtttaagtggctgattgtcatcgttaatgatgacatcgcctataaactcaaagcctagtttttgtagtaccttttgcgagccaatatttgtttgcgaggttattgctgcaagcactccaagatctaatacgtgttttttggccatcaacaacctagctgccgatgtaataatacccttgccttcatatttggctaacaacgcgaaccctaaatcaggaatagctaatgcatcacgctgaaacagccccaccataccaaccggtgtaccttcagctaaacagacaatataactaccaaagccatattgctggtggctatttataaaggtttgttgaatataatgctctgcttgtgctggtgtatttatatttttatttccgatatgctctaaaaatgttgcttggtttaaaagctcaacaataaatgccgcatcatcaggcaggccagcacgtaaatatatatctgtcatatattaaaataccttacttaccacatcattggtaaaattaagacaatctaaaacacgctctttttgcactgctgagagctcgtcaatagcgaaataagcatactcagtatgctcattactcaacactatctgggcatcattaggcagatgtgctcgaaaaataaacgcatgagaattaaatgcagtgtgataataaacaccacttaaataagcgatatctacctcacaattaagctcttcttggcattcgcgaagtaacgcttggtgaattgtttcgcctttatctaaagccccgccaggtaacccccaacttttttgaccataattagctttaagtaatagcacttgaccttggttgttggttataaccgcgtgactactgagtctgtatgtatctgaaaatgccataaacccttgcttaatttaattaaaaaagtaacaccgttgaagagtgtaaaataattatcatcgcaataaaaattcttattgactaaatttatattcaagattatttttctttcgatgttttgggcaaaacaaaagcagtataccctctgtactgtctggcgccagccaacgcaggcactttccctactgggtccataaaagtgtgttcgcgtaaagcagttacttgagtcgatagacttcggatttctgtaagcaatctcgcattgcttaactgtgtgaaaaatataatgcaagaaccttctgcgttaagtttactgccgccagtattggtggttgttttggccgtgtttttacgccgccctattttatctttacttgttggagctttgtttggtttagccatgcttgagccaacagctatactgtcaaactttactgatatatcgttaaaagtgatgcaggatgaaaccattgcctggctaattttagtctgtggcgggtttggtgccttgattgccttattggtaagaaccggtggagcaagtgcatttgctgaattagcgttgaagtttgccaaaggtcaacgttcatctttgctaatgacctttgtgttaggtgtgattatttttatcgatgattatctcaatgcattaacggttggtgaaaccatgaagcgtatcaccgataagtttaaaattagccgcgaaatgctagcttatgttgttgactcaactgccgcacctatctgtgtgcttgtaccactctctacatgggcggtattttttggtggcctattagtcgataataatgttgcagcagaaggccaaggtattgccgtatacatcgaagcaatcccttatatgctgtacgcatggtttgccgtacttgttgtattgcttgtcagcttaaatgtgatccctgcttttgggccgatgaaaaaggcacaactacgtgcaatgaataatcaaatcgagatctcaaatagccaatacaccgatgtacaaacagcggatgaatacgctgttaaagccgcagaagagaactttgaaacagcagcatccaatggcaaactctataactttttagtgccgattattttacttgttgcgtttactgtttatttcgacattgacgtatataaaggattgcttgcaacctttgctgtggtgttaccgttttatatgttgcaaaaactaatgacattgtcagaactagtggagcgtatgttagatggttttaaaagtatgatcccagcaattggaactgtcgttgcggcctttatatttaaagatgtgtgtgaccaattaatgcttccgcaatatgtcattaatactttaagcccttatatgacagcacagtacctacctgccgtggtgtttttagcaatgtcagtacttgcttttgcaacgggttctagctgggggattttcgcagtaactattccaattgtgatgccactggcttatgcaattgatgccaacattcctctagtaattggtgctttgttgtcggcgtcatcgtttggtagtcaagcatgcttttattctgactccacagtacttgctgcacaaggctcagggtgtgacttagtcagccatgcggttactcaattaccttacaccttactggcggcaaccgctgcatttatagggtttttgctcatcgcctaaattaaaaagcccaagcaattgcttgggcttttgtttatcaactaataagttacttttggaatttaattcctttgtaataagtttctaagttttcaacttttgtttggtttttaaggtctgcaaatggcttatcagcgaacttgctaccacgcatttgaatgttcaagcgtggtgcttcactgttcagcatggttttcttgtaataatctttcaaatcagccaaggttactttttcaacttcagcaataagcttttctttagagtcaaagttaaagttttcacgataccaatctgtgataagtggtgacatttcatcacttagattcttaggttgctcttttaaagataccagcgttgcatttttaagttgtgaaaatgtttcttctgtcatgttatcaagctctactgcgtattgctttttaaactcatcaaagcgttcttgcatttctttagggcctttaactggtgtttggatataaagacctagtgcagagtaatcttcaatcggacgggctaacgcaccaacagcataagcaagctgctcttcggtacgaagcttatcaaaagcaatcgttctgaagtggctttgtaacacttgcgcttgagccttttgcttataacccggtgttggatgaacaaccatatcgataatcgctacatcagctacatcaatatccttttgcaatacaatacgttcacctatttgtggcaaccatgctttgctgcgagcaaactcagtagatttatgagccttaggtaatatagctgttagcttattagcaatagattcaacatcattttggttgtagttaccaaacgtgaatacacgtaaatcatttgctgcaagagttgattgcttaatagcagtaaaatcagcaagagttagcgtatctgccgccgcaattaaggtttcggtatcaaatttaccacttcgtgttagcttagaatattcaccaaatgcttgatagaaaggaaattgcttttgttgatttagtaaatcacgcttataacggtcaatcgcttgtgcaaaaccatcttctgatacatttaaagtcagattttcaagcgcctgagccaataatacgtcctgcttatcagtaaaaccgctcagtgataatataagaccattgcttggctgtaaccccaaactcatacctgctacagccgcttcagtgcttaatttactttgctctaagttatacagatcagcccaaattgagtaaagcacctgtgcttttacattaactaatgcatcaggtgtgttaatgtaaacttcaacaagccctttaggttgctcagcaaattgctgacttgcttggcgccaaactttgacaccttgcttatcaaagaccagtttaggatgtgcttgctgtttaaattccgcggtcttaatagcaaaactttctggcagtaagcggtttacagtaggtaaagctaaagcatattcgcttggtttattccagcttgcaacttcttcgtcgctgatatcttcaatacggtatttaccatcgtaaaaatgtagctgcgagtctgtctcttcttgctttgaaatataccaaatacgtagcgtctcttcgtttaactgtgaaagcacgttttgcacagcgtcagcatcaaactttgcataataataaggtgcattaattgcgttgttcactgggaacttttgcatactatcagtaaggttacttacgtagccaaactcatcacctttttcaagaaattgaaactcattgtttaacgaagtacgaatttcattaaaatacttgctatcaacaccctgctctttaattaacgcaatatactgcattaccatagcaacaatttcttcacggttttgcatgccggcgtcagttagttcaatacttactgttaagctgccgtagttaccatattgtgtaggtgcatcagaagcagataaacgtgatacccagcctttatcgcgtaatatttgtgccgggctgccttgcatttcattacttaacaagtaagacacaaagcgattaggtttaactgcaaactgtgaactgttatcggtgatcgtaaattcaagttgtaattgttttacgtcttcatttggtgaatagtaaacacgtttgccaccggctttatcaaaatcaagtttatctgttactgttggtttttcgatatgtttattttcgatatctgcaaaatactgtttagcttttgcttccatctcagctagcggacggttagaaatcatcgccactttcatgatattagatgaatagtatttattataaaaagcaaccgtttctttatgtaaatcactgccttctttatcacctagcgtttctaggttaccaattaagaaacggtttgcaggatggtctcccatcatcttgcgtgctaatttaaattgtccaaaaaagtccatttcacggcgcattgaccattcagcattaaccgcatttttttctttatcagtgtattcagggtaaagcttaggtgctttaaaaaagtcagaaaaacggtctaatgcttcatcataggcatcgttatttactttaaacatataattagtgatatctaaccaagtgtaagcgttgtgcgcaccaccgtttttggtcataaaatcactataacctttggtatcaggatagcggtctgtacccaggaaaagcatatgttctagataatgtgccataccttgttgcgacatagggtcgtgtagtaaaccgacaccaacactaagtgcagctgctgacttttctacactcggatctgagattaaaataacatcaatctcattatctagttttagtgttttatattctcgggcatcatttggactgacaaccaaagaatcaggtataaggctgctattagctgtagatgaagtcatagtagatgttgaagaacacccagctaatacagcaaatgcgattgcactaaggcccattatttttttcattattatgtatccattagatattgaatcaatttttatttatgatgagttttcatcagccgcaattcaatgctttttaacagactaacactaaaagtttgtaacacattgtgaaaaagcaatgcaaaaggctaataatcataataattacaatataaaaggatgagttatggaaaagtggctaatcgtagcgatgtttactcaggtattacttacattcatagtaatgtacattatgggcaagcgccgctttagcgcggctaagaaaaaaaccatagaaatgaaagactttcttacaatggatttagaaaaagcaggtgcgcacgtgtgtgttgcagatcgtaactttataaatcagttcgaaatgcctgtactgttttttattgcgtgtttaactgcactacaactaaatgctgtaggtactgtttttgttggctttgcttgggcttatgtcgttttgcgcataatccatagctttatacatttaacctctaatacgttaaaggctagatattatagctttgttatcagtagctttattatgctgattatgtgggtactgatattaataacaatcttttaatactcagtaatactaagaaataaggcgcttttaagcgccttatcaaggaattatttacgacgacaaaagccaaacaaagctagtaaagacagcatccacgccatactaccacctgagccactgtctaaatcacctgaaggcttatcttgtttgatcagcgtgttttcttttggttttaataattgagaagagttcggatcatcgtcaagaattaccacactattaatagttactaaattctcaccattaaagcctgaggtatctgttggacattgatcgttatttaaaccaacaacaggaatatcaccacagtgtgtgagttcagtgattttatctaacaccatttggctttcagcagtaatttgaccgaacacagtaaaaccaccattttgaagatctaaattagcgctattgtcttttaaattgaaaaaccattggctagttgcactatttgcattaccaccttgcttagccatcgcaatggtgcctttcacattagatagtttaggctcattttttatcgcatcatttgtttcaatagctttaaaatcagaatcaaatttaaatcctccgccttgtaaaacaaaattctcaacagagcgatgaatgacactactattataagtgccctcttctacataatttaaaaagttttctacagttattggggtgtgttgatcaaatagattaactgtaatcgtgccttggttagtttgcatttcaatgatagttgagttggcgctgtagcttgctgcacaaagaacagaggcaattaaatattttttcattttttatctttcctgatatttttattctaaaactgcagcaagactaaacaaaaacgctaggcgcttaaatagcaaacaaaatagttacacaaaacgcgccaaaccaattacaagttagttacatttatttacaccgcgtattcattatggttataaaaaatataaatcttaaatcaaaatcgtcttatcaaatagactgagtttgttagtatttgcatgacaacaaagaacacacaggaataaaccatggcgaatgaagaaaacgcaatatgcgattttggcttacaccaaggtgagccgtatagtaaattaccagcgagcttcttaaactggatggttggtaataaccatcaaaaatcacattatgcagaacaagagttaattcgtaggcaactcgctgcgactggacaattgaataccgaaaatagcaataaaaatctataaaagacatttaatttaaatataagtcgtttaaactaagcgcttaattaactactgcttttaacaggcaaacaattatgcgcttttttttatcttcttttttactgcttaccttagcggcttgcagctcttctacacacactgattcagtacaatacctcacattactccatacaaacgacaaccatggtcgcttttggcacaatgagcaaggtgagtatggtatggcagctcgtaagaccttaattgatcaattaagagctgatgctaaagcaaaaggtcatgcagtattattactctcaggtggcgatatcaatacgggtattccagagtctgacttacaacacgcggagccagattttaaaggtatgtcgttaattggttatgatgccatggcaattggtaatcatgaatttgataatccactggcagtacttgatcaacaacaaaaatggtcaaacttcccttttttatcagccaatatcatagataaaacaactggtgaaactcgttaccaaggctataaaatctttgaaaagaatgggcttaaaattgcggtaatcggtttaacaaccacagatacagctaaaataggtaaccctcaatatattggcaaccttgagtttaaagacccaacagcagttacagcaaagctagctcctgaaatcgataaacaatacaaccctgatatcactattgctgttacacacatgggccattatgttgatgcaaactttggcattaatgcaccgggtgatgtaacaatggctcgtaacctaccaaagggtacacttgacataattgttggtgggcattcacaagaaccggtctgtatgaaagaagccaacgtcgcagatgagagttttataccaggcaaagagtgtaagccagatcaacaaaatggtacttggatcatgcaagcacatgagtggggtaaatatgttggtaaagctgaattcaaattagaaaatggtcaactaacactacttaattacgcgcttattccggtaaatctttatatcaatgatgaaaacggcaataaaaagttggcagctgattacatcgaaccaaacaaaaacttacaagatgtacttgctgtgtatcaagcaaaaggtgcagcgcaaattgctggaaagattggtgcagttgatgaaaagctagagggtgaccgtaacaaagttcgttacgagcaagtaaacctagcacgggtaataattgctgcacaaatgcaatctgttggtgctgattttggtataataagtggcggtggtattcgtgatagcattcaagctggcgatgtgagctataaagacattttaaaagttcacccttttaaaaaccgtatcacctatattgatatgaccgggaaggcattatttgattacctatctgttgtgacttctttcccacctgattcaggtgcttacttgcaatattataaattaagctttaagcgtgaaaacgacacattatctgatgttaaaattgctggtaaaccacttgatatgacgaaaacatatcgtatgagtattaacagctacaacgcctcaggtggtgatggctaccctactcttacaaacaaagaaggctttgtcagtacagatgatactgacgcacaggcattaaaacgtttctttgagcaaaatagtcctgttaaagcggccgatttcgcgcctaaataaacaaattaaaagtaaaaagggaagtcaatgacttcccttttttagttttacttacctatcacttcaatatcttctaacgttatgttctttaatccataatgatgtaaacgtgaacgtgaaccttcaccatgcgctttcggtgggtaataaacatctttaacttctggttgatcttgccaaacgtcatcaagcgcagcgcggatttcactcaaggttttttctaaactattggtaaaatttggtcttttccgaactgtatgacctaattcaactaaccggtaaaaatacttattagcgagtgtaagtaactcttcaggaacatccttattctgattgagcactacatcaggattttcagtacaaaactcaaccaaagccaaataaaaacataacggcttattggctaatgcaacaggtttatcagggctacaattcgctgccaatgttttattttgaagatcgacaatcaaaataggttttgttttactatttggttcaggttcaggaagttgttttgcaacttgtaattttgtgcgttcacttaagaagaataaataactaatcgcaagtgaaaacaaacataccaaaataaatactgcaatatcatttttatttaaaatattgttattaataacaaaactaatagtaaaaactttttgtggtgtttgaagttgcttttcaatcagatctgctcttgctgggaactctgtaattccttcgatggaataaacaaaaatcggggtttctttgagctgcgaattaagcttagcaaggtagtcaataacagcctctttactaccagaatgctttaaaaagtcatcaggaaggtttaaatgagttaaatctaaggcgattcgcttctctatatttgccaagcttaattgattattctctgttgacttaaccgcttttgcaagaatatagctaccaaataagaccagacaaataacaaagaataaacaaccataaattagctttactctaattggtagcattgtttacctcagcatttattcgcatcgagtgttgcgttttacagttaaagaatgattggacatgattgaaataatgagaattttggtcatgcgctaaatcaattaaacgtttttgaacagcacacagaagatctgtgttttcatcttgcattttaaggtaccaacggctgccactaatgttgtcactgatgggagtaatataattgattgaaaaacgttgctggtctatgtcttgccaataagaagaaattagatcaactttaccgcttgctagtaattctctcagctctgaatgagagccagcataggtaatgtctaaattctctaaatttatatctaactttttaaacaactgttttggcaaaatatgaccagaacggcttgtagggtaatctaaaaggccaattcgtttgtcaagaaaataacttttatctagccgcggcttttctttgcttgaaataaagtaggcggtgtaatcaggaaaaccaacaacggctttatagttgtaagttgattctgccataaaagcgttaattaagttttcttttgcaaggatcaaatctgctaatcctttacccaaaaactcaactgtatcagatgtcttgtaaccccaataagatgtaaccttgccatattgcttactgatagtgtcgtcttgacataatgaaaacgcgacatcttcagctagccgtttaccagatgaatatacgacaagttcattaagattaacctcagatttagtatcacattgaaaagaagtttcaataaacgtatcgatatcagatataggcttatttgcttgtaaaattcccacaaaacaaaacaagccaaacgacagaaacaaaaatgtaacaatcaaagatttttttattagtattgttcttaaattcaatttttatagccaacaacgcacccttgcctctatttgaacaattattcttacttattacaacaggtaattttacctgaaataaataactcattgtttttaaacatatatgaacaagaaattatgaatcttattgagtcctttctatttgttttaaaattcaggagaattagcaccaagtaatcgtgcttcagggcacattcatttttggacactgagtcaatgttacaaaaaacaataaagatgttgctgttatcgacacctgttatttcatcggtgttaagtactccggctaatgcatggggacaaaatggtcatcgtattgttggtgaaattgcatctaagcatattactgacaccacgaggcaagcattaattcctttacttgatggcgagtcactccctcaaattgccacttgggccgatgaaatgcgctctgcccctgagcaattttggcaaaaaaagtcatctcgctggcattacatcaatttcaaagagggtgatgctgatccccagttcgactctcatgcccaccacaataaagacacagtgtctgacatccttgaagggatggaatattcaatttcagttttacaaaaccaaaaagcatcacttgcagaaaaacagtttgctttacgctttttagttcatcttgttggtgatagtcaccaaccattccatgcaggtcgcagtgaagatcgtggcggcaacaacatttctgtcacattcttcgggcaagataccaatttacatagcctatgggactcaaaactcattgaaaatgaaaatttgtcctatactgaatttgcgcaatttataaatacaacaaatcaagcgttgataatggactaccttaccagttcaccaagcgattggttaatcgaatcacataatattgcaaattcaatctataaagaaaatgaaacaaacgtaagttatagttatatctataaaaacttaccaattgttaaaactcgcctacagcaaggcgggataagattggccggtttattaaatagtttatttgataaatcagcaaaaccgttagtaaaggcacttaagatgccaactgacagcaaactataaatgaaacataacctctaacacgggaaataacataatgaaaatccaactccgcaaaacagctctatcacttgctattgcagcatgtgttggtgtgagtggtgcagcgttagcaaatgaaacaacatctgctatcaagggtcaaatcaaaggtcctagcggcaaccctgctgctggcactaagattactatcgttcacttaccttcaggttcaactaaagaaactgaaacgaacgatgcgggttacttcacagctaaaggcctacgcgtaggtggtccttaccgcgttgttgtagattctgacgtatttgcagatcaaactttcaacaatattaacctacaagttggtgctgactaccctgttaatgttacgttagagccgcaatcagacatcgaacaaatcgttgttacaggtcgtcctatcagccgtatgtctggtggtacaggtcctgctgcgactttcacacttgaagatttagaaaaccaaccagctatcaaccgtgacttacgtgacatcgttcgtattgacccacgtgtaacaatcgatgatagccgcggttcaatcaactgtggtggtggtaacccacgtttcaacagcttaacgctagacggcgttcgtatgaacgataacttcggtctaagctcaaacggttacccgacaattcgtgctcctttctctttcgattcaatcgagcaggttgccgttgaactagcgccttttgatgttcaatacggtggtttcacatcgtgtaacattaacgcagttactaaatctggtggtaacgaagtacacggtggtatgttcttcgattacacaaatgattcaatgaaaggcgacaaaatcgaaggtgaagactacgacaacggtgattacactgaaaaacgttatggcttcaacgttggcttaccacttattaaagatagccttttcttattcacatcttacgaaaaacttgaaggtgttaaacagtacaactacggcggtttagacactggtagtgtttcagcggcagatgttgctcgtgtacagcaaattgctcaagacgtttacggttatgacgcaggtggaatgccatcaagcgcaccagttgaagatgaaaaaatcttagttaagttagactggaacatcaacgacgatcaccgtgcaaacttaatctataactacaatgatggttttacactgtctcaatcggatgcttacagcaatacaattactttagataatcacttcttcaagcaaagtgctgaatttacatcaatcattggttcactttactcagattggtctgatgaattttcaactgaggttcgtctaggtaaatctgagcttgaccaaactgtacgttctttagatgcggcaagtagcttcggtgagatgcaaattcgtactgctgatggtggtacaatctatattggcccagatgactctcgtcaatctaatgctcttagctacgaaacagtaacagcaaaaattgcaggtacttattaccttgatcaacacacaattactgctggatatgagtttgaagaattagacgtattcaaccaattcgttcagcatacgcaaggtgagtggcgttttaaatcagttaatgattttgaagcaggtttagcagaccgtatctactataacaatgcagcgggtacaaacaacccaactgacgcagctgctaacttctcatacgcacaacacactttctatgtacaagatgagtacagcttcacagatttagatgcaacattaacatttggtcttcgttacgacaaatacacaagtgacgacaaaccaaactacaatgaaaactttactaatcgctacggtttcagcaaccaagcaacattcgatggtatcgatttaattcaaccacgtgttggttttgaatggtacgcaacggatgcattagaagtacgcgctggtgttggcttattctctggtggtaacccgaacgtatggttatctaactcatactctaacgatggtattactaatatcagtgcttaccgttcgggcggtatcgatttattcaatacgccaaacgttaacggtggtacgccaggttacgaagttccacaagatatgtatgatgaagttgcaaacacagttattggttcaggtgattcatctgtaaacgctgttgaccctgatttcgaaatgccatcagagtggaaatactcagtgggtgcaacatacacaactgaagatgagtacgtattctcactagattacttattcactaaacgtaaagatgctgcattcctaaaagatatcgcgttacaagattctggtgaaacaacgtttgatggtcgtccaattcttaagtctaaagaaggtcgtcgcggtgacttattacttactaatgtgagtggcgacagtggtgagtcgcatgttatctctgctgcgatgagcaaacgctttgataacggcattagcttacaactagcttacgcttacactgactcaactgatgttaaccctatgacaagctcggtagcgagctcaaactatggtaacttagcgacatacgatccgactaacccgggtgcacacacatctgattacgagatcccacatcgctttactatgacattaggttacacaactgagttgtttgatggttacaacacacgtttcaacctattcagcgaaacgtacaaaggtctaccttacagctacacgtttaatgatagagacaatgatgtttggggtgataacaactcaaacggtagtcgtcagttaatgtatatccctgaagtgaatgatcctaacgttgtttacaacatgacacctgaagaagtaactgagtttaaccaatggatttctgctcaaggccttgaacgcggtcaaatctctggtcgtaaccgtcaaaatgctgattggttcacgaaagttaacttcaagatgactcaagagttacctggtttcatgcctggtcacaaaggtgaagtattcttcgttatcgataacttaactaacatgttaaacgatgactggggcgtacttaagaaaggtagttttgttggtaacagcatggtgactgttgaccttgatgaccaaggtcgttatgtatactcaaactttacccctaacaatggtaaaactgcaactcaaagcagcgcatcagtgtgggaaatgcgtgtaggtgtacgttacacattctaataacgagttaaccttgttataaagcaaaagcccgcccctactggcgggctttttacgtttagaagaaagtgagtgagttacaggttactcggggaaagttagcaaggaacaagagtaaagttagcaagttgctagtagcagcgattttatatcgcgtttgatggctgagggctgatgtttaacgcgatccagcgttgttatgtaagtcgtcatttatggcgacaaatctttaaacttgaatgatcacggactaaagcctgacctaccctgatatgaaaatgcaggccaatttgacctgcacacaaagttttatttaagctgcgtaaaccgcaagtggatgggttgtattgattgaaacatgcacagcatcacccgggcgcactatcacctcatggctcacacggcttgtcaccacagtatcgcatgccagtttaacagcgcataatcggctgccaccctcataacgtacccaggtcacttcaccgttatttgtattagcattattaattagatgcacatcatcagggcgcaacaatacatcaacctttgctgcatcatgatctattttgattgctggtgcattgcctatatctgttgtggctgtatcacctacacaattaccggcaatgaaacttgcctcacctaaaaagcgtgccacaaaacgattacttggcaagctaaagcaacgctcaggagtatcaatttgctgaattatcccctctttaagcacccctacacggtcaccgacagataaggcttcctcttggtcatgggtcacccaaatagcgggaacacctgcagcctttaaagcatttctaatatcccatcgaagagtatcttttagagctgcatctaggttagataatggttcatcaagtaaaacaaagtctggttcatgagcaagagttcgagcgagtgcgacacgctgcttttgaccacccgataaggttgccggctttttatttcgaaatgcttcaagacctagtagctttatccaatgatcggctttagaagtatcgttaagtctaaagcaaatattctgttcaacagttaagtgtggaaaaagggcaaaatcttgaaacaccattcctactttacgtttttccgggggaacttttagttttggcgtagctcgccatgaacctaaatttatttcgccttcgctaataggaataagcccagctaacgcttgtaaaattgtacttttaccacagccagttggaccaactagcatgaggatctcactttccccaagtgataagttaagttcacttaccacacgattgctaccataatcgatagacagcttactaactgatagcattaaactgatccttaatgttctaattgactgcgcttttcaccagagagcattatagccaagccgcaagctgatatcactaccaacaataaaccaggaatagcagcacggccaaagtaaccggcttcataaacacgccacaaatatgttgaaagggtttcaaaacccgttgggccaagtaaaagtgttgcttcaagttcacgcattgattctaaaaataccaaagcagcacctgcgataataccgcgcatagttaagggtaaagtaattcgcataaatgcttcacgtgggctggcacccagtactcgtgctgactttattaaacttgaatctagatgctcagtactggttcttacagagccaactgcaagcggcaaaaagcgcagcacataagcaattactaatagagctaaggtttgataaaagagtggcaactgtagaccgccatataccaatgccgttcccatcacaatacccggaataccaaatccaaaataagttacacgctccataatacgcccagcttttccactcaacgctgcatgagcaacaggtacagcaacaacaacagcaacgatagcagcaatacccgatgcataggctgaatgccaagcaatactgaagtcaaaatctgcaactccatcacgggcaagccaaagtgaaaaaattgccaaaggtaaacaaatcgcaagtagcaatactggtaaaaatgtcagtaacatcgcaactttttgaccattcgatggaaataacatcaatgaacggccatggcgttctgaagctgttttaatttgtgactcgataaacaataaaaatccaacgataaccatcagttgtagcgataacattgccgcacgactcaaaccaaaagcgttgtattctacataaataacccgagtgaacgtatctaaacgcatcatcgccggtgtaccaaagtctgataaggtataaagcgcaaccagtaaagagcctgccgctataccattgataacccgaggtaaaataactttaaatacactcattgtcatcgacatacctaaagtacgtgcagcattaaccatgctggcatctaagctaagtaaagatgatcgagttgttagcattacaaaaggaaacgtgtatagggtcattacaatggcagcgcctgttagtccatacataggcggcgtttcgaagccgatcagctgatttatctcaccaccagggccaaatgcagcatacaaggtaaacgcaccaatataacttgggattgccagaggagcagcaaacagaacaagccaaagctttttaaaaggaagttgaacataggcactaataaacgccagaggtacaccaattaaaatagagcctattaccgttaacaccataagtgataaggtgttaccaagaatttttaagttatgactatcaaatacagcagtcgcatcacttgctaaagtgatcagaatataaactggcactaacgccaaaagcgctgcaagcagcgccatgggataagaagcaggtatgcgcattataaaacaccgctactgcgcataaggtcgagtgttggccttaaatctgccaattgagttaagtcaattttcggcggtgatacgtccgttaatgcaggtaacccagctggttgttcaatgccttggatcagtggaatttcataggcttcacgggctaagtaactttgtacttctgaacttagtaagtaacgcataaaattcatcgcattagggttatctgttaacgataaaacacctgatgcattaactaaacaaccggcatcttgattggtaaaagcaagatcaagattagcatctggtttacctgacttaagtcgtaatgtgtaatagtggtttgcaaagccaatatcgacttcaccacgttcaactgccattactacaccaagctcaccagcataggttttcgaacgtttttgaacttttttaagccacttagcggttttatcttcaccttcaagaatacgcatagccgttacgaatgattgaaaagatgcgtaagcaggtgcccaacctattgataaatcgctgtcagcaatcgccatgatactgtcggggatatcatctttgctcagacgcttggtgttataaggtagagttcgaatacgcccggtaaccggtgcccaaccagggtaacggaattgtggctgtaactgtgctgctaaatcacttggtaatggtttaaccaaacccgcgtcggtaattaaaccaatcgcacctgagtcaacagcccaaaataaatcagcacgtttaactcctgctttcgcttcagcgacaatcatattgccaagcgcagccgttgggcctctacgaattgataaattcaattttggattattcttttcgatcgactgcagtacgttttcgtacaagccgccttcgccgcggcctaaatataatgttaagtcaccctcaagggcgggtaagtcttttacagaaacggggcttgcagcactggctgcgaaggcacgagaaagaggtagtggcattgcgcctactaccccgaacgcagcaagtccttgaataaaggttctacgcttcactaaaatacatccttacgagctttttcggcttcttctagtaacaccttagcgcgatctagcttttcttgcatatcaacaaccactgcacgtacttggtcaacagaccctttatcagaaatcgcttttggcagggttacattaaaatctttttcgagcacttcgactaacttcgcatctttttcgataagtgtaccttcaacaccttcgaataaatgaaagtaagtatcatgtacgatttgtgttgcttcatcgcttaaacgctctgcgtactttgcaacaacacggtctaatttgtgtttgatttcatcgatggtagcactttgcgtcatttcttctgaagcagttgcttttacagcttttaacaagcctttttgctggaaatccgcggcaagtttaacagctcctaaaccttgccacaaggcggcattcaacgccttttgatgagtgcgaacctcagctgcaggttttttatcatcaatagccattttgatgccataaatactttgccaaattgatgcataaaccggtacatagtttgtttcaattgcactatggaactttactgattcccagtattcgattaggtcatcactttttacagctttagcacctttgctttcgtaatcactcaccatgacatcgactttgttgatcatccattcaacgtcatcagagtaatcttttaaattttcttttagatgattaacgtgctcaccaattgggccatttgccaatacaggttgggcaataaaagtagatgctaatactaggcttaaacctagtgtcttcacggtgtttaacgctaatttcataacaggagacatccaaattgctaattgtaaatgatagccattatcatatacgtatcgattccctaaatcaattgctataatgcattgattacagatttacacatttttatttaagtaattggaaagcttactaagagtgttcataaattgtttaatttcttggctatctaattcactcactaaacttgcttgccattcgtttgctaacggaacaatttgtttatgcaaacctactcctgcctctgataacgataacaagtttgcgcgtttatcagttgggttcgcttttgctgcgatcagatttcttgttaataacgactttactgcacgggacaccgttgacttatccatttgtgccatatcacacaactgtttagcagtgcattcaccatattgagccaggttcgcgattactcgccattgtggcacggttaaatcaaactgcttttgatatagctcactaaattgctcactcatctgcattgcaatattggttaatgagtaaggtaagaactgctgtaaatcgagcgttgggtgtttgtttgttgtcatggcttcactactgtcaaaaattatttacacaagtaaattcagtgcagtttgaatttagtctcacatgagagtatcttacctaaaacctttcaggagtctagtgatgaataacgaattacaatatatgacaggctttggtaatgagttcgaaaccgaagcattacccggtgcattacctatcggtcaattcagccctcaaaaagtaaaatacgatttatatgctgaacagttcagcacaacagcatttacagcgccgcgtgctgataaccgccgtacttggttttatcgtattcgcccgtcagtagtacaaggtgattatacacctatagacaaaggccttattcgtaccgctcctattacagaagtcccaacgccgccgacaatgctacgttgggatccaattgaaattcctgagcagccaacagattttattgatggtttgattaccatggcagctaatggcagtgcaaatgcacaaacaggtataggtattcatatctatgtagccaataaatcaatgcaacaccgttacttttataatgctgatggtgaaatgctgttcgtaccacaacaaggtgaactattactaagaactgagtgtggaaaactaacagtccgagctggtgaaattgccgtaattcctcgcgggattaaatttgctgttgatttattaacggacacagcccgcggctatatttgtgaaaactatggccatgcctatattttaccagagcgcggtcctgtaggagctaatggttacgccaatgaccgtgacttccactaccctgttgcggcttatgaggatgtagagggagactttgaactagttgcaaagtttaatggcaatatgttccgctgcgatattggtcattctccattagatgtcgttgcatggacaggtaatagtgcaccatacaagtatgaccttgctcgattcaatgttatgaataccgtgagttatgatcacccagatccttcaatcttcaccgtactaacgtcaccatcgggtacagaaggtgtcgcaaatatcgactttgctatcttccctcctcgttggatggtggctgaaaacacattccgtccaccttattaccaccgtaatattatgagtgaattcatggggcttatcgaaggcgtatacgatgcaaaagagcatggctttgtacctgggggttcaagtttacataattgtatgtcgccacatggtccagaagcagatgtatttgaaaaagcttcaaatgccgaacttaaaccacaacgctacgaaaacaccttggcatttatgttcgaatcgcgttacgttatttcaccaactaaatatgctcttgaaggtaaagagcgtcagcctaactatactgactgttggcgcactattaaaaaacatttcacaggtaaacaggacgcataatgaaactttatagctattttcgttcatcagccgcttacagagttcgcattgctcttaatttaaagaacattgatcacgagttggtcactgttaatttattaaaatcagagcagcaaagtgatcagtacctagcaaaaaacccacaaggattattaccggcactagaaactgatcaaggtgtgcttgcacaatcgctggctattttagagtggcttgaagaaacgcacccagaaacaccgcttttaacaggtggtgcatggcaaaaagcccagatccgcaatttatgttatgccgtagcgtgcgatatccaccctatcgataatttgcgagtattaaagtacttagctaatgatcttggtgttgatgaagaagcaaaaacgacctggtataagcattgggtagaagttggctttgagagtatcgaaaagttacttgatgaagcgaacactttttgtgttggcgacaaaccaacacttgctgatgtctgtttagtgccgcaagtatttaatgccttacgctttaacgttgatatgagtaagtacccaaaaatcgccgcagtttatgagcattgtaataatctagatgcctttattgatgcggctcctcagaaccaacctgacgcaatctaattcgttgttattaaaactaaaggcccaatcattttgggcctttttattatctaatttttatctcagtgctgaattaataacactcacgtgattgatcaaatctagccctaaatccgttaaatagccgccatcagggctatcagtaatgcctttgtcataaagacgttttgcagcattttttactgtttcttctgcatcagagtggattttaatgccttgcatttgtgagtcgcggggaaacttagcaagcagggttaattcgtcaatcatatttttattaaattgcatgtgttcacctttttattatcacgtcattgtgcttttatagaatacagtcataagcttagtgtagatacaaaaaactgcacaatgagaggtgtattttgtttagaaagattttaatcttaactaccttgtttattttattgttttcacagttcgttttagcaaaggataaagcattagttgtgctagatggccaagaagcacttaacaaccacaaagtgtgttggtatgaaaataagcgttacaccgaaggcgcttatattgctgttggcgatataacgttaatttgtgcagccaaacagccaaatttttcaaacagcgacttagcgtggttaagactggataaaaacggcgatattgtctatccaaaacgaggcaagagtataaacgtcaattagcttaaagacgctagatacgttactattactcagtttagaaataaccaaagattaagcatggacaatcaaccaaataaccctttgcacggtatcaagcttgccgacatcgtaacccaacttgaagaaaaacttggctgggaaggactagctgagcatgttgatgtgcgctgttttcaaaatgacccaagtgttaaatcaagcttaaaatttttacgtaaaacaccttgggcccgtgaaaaagttgaacaactatacattgatactttctcctctcaaaaggccgatgatgacgcaccttttgagtggaaaagtattaaaaaataactgttaggtttcggccattatcaccgaaagtgacttcggtgatacctctaccaccagcttttctgctgttttaacctcaccatcaatcacataacttatgtctttttctgcacttacagaaactcgtttagcatttgtatgatggctattaatggcaaagcttgtttgcgttatgcttgaaaatactaattcagcaatacttaacgtactggctttagcctctgagttaggcgttaaccaattaacatcaagtaaaccatcattatgatctggctgacctgctgattgagccaacaatgtagtaaacggcgctgcatttgcaatgattaaactattggtatttatagactgaggttcattgtcgtctaatgtaactgtataatcttgcgcttcatgttcgcttagtgcctgccaaaatccttgtaaataagccagttggccggactcatttttagcatctcgatgcgccttttcaatcattttctgctcaaacccaattcccgctaataacagcattcgctcgccattacacaaagcggtatcgatccgacttgcctgtccctcaataataagttcacaagcttgttcgactgggattaacttagattggatccccattaatacatgagctaatgcattagcagtgcctaaaggaataatgcctaacttacagtcggtattgactaatacactggctacttctgtcactgtaccgtcaccaccacatgcgataacaacatcgggatttgtttctatagcctctttagctaattgaataccgtccacttcttttgttgtagtgtgtactgttaaatcataatattcacttaaccttgcggttatctgctttttcttttcttgccacagctttgtaccagagactggattagcaattaatacagctttgtttttaattagtaaatcgcctcgacgatgacgttttattaagtgacgaagttggcgcttgtttaaattagcagtttctcgagtttctttgatttgctccaaaacagtatgaacatctgcatctttatcttggcttagtaagtatgcagccataacaaacactgaacgaccgcgacctaatgcgcaatgcacaacaacacgtctatcagcctttacttgatggtggatccagttaattgcttgatgtaattgcgcacgagttggcacactgtggtctaaaacggggatattcaaatagcgaatattttcttgggtcgatgaccattcaaggccatcaaactcacaggtaacatctaagattgctgtaatccctaactctttcatggtgtcaatatctgatggaaagagcctgcaagctaaaaacagatgttcatttatttgttgtaagggaggcactttatcatgcttacgagaccaagcattgtatatttgagcccctagtaaaaagggaataaacgcccaacgaatgtaaattggtattacaccgttttcacgctttctgaaaattcgcgcaatgttaaaaaaataagcaccactaactagtagtagcgacaatgcagcccaataaaaaaatagcgcaaaataaacgagctcaactcgaattgccacgattataaaaataatagccagcgcaagatagctaaatgctgcccacataatcactccttgttattctaattacatagtacgttgcaaatttcactccagtaaaaccgccttatttaaacttggtgactatttaaaatcagtaacttagcgttcacttaaaaacctacactttaagtttaggacattttttcacaactttatgaataacttacactaacttacaaataatttacatgtaggttgctaacctaaacaagactgctaggataaccagtagaaaaatgctttgagttttaaattcactggttattttttattaaaaattcttttgcatctaaaaccacctttaaagcgttactaataacataacaggaattatatggacaacgatgaacttttagcgcttttgagtgcaacagcaaaaggtaataaaaatgcctttgcaaatttgtaccaaaatacgagtgccaaactatttgcaatcagcctcaagatgctcggtaatcgagcacaagcggaagaggttttgcaagattcatttgttaagatttggcacaatgctagtgaatatcaagtatccaaaggggctgttatgtcctggatgatcagcatagtgagatatcgaagccttgaccttattcgtcacaacaaagtacgtaaagagcaaagcctcacagatgaacatgacttaggggatggttcatcacttcaaatcagctatgaagatgactctaaattagtagattgcatagaacaacttgatccacaacaaaagcaagctattcacttagcttattataaaggactgactcatcatgagcttgtagatcatattgcttcccctcttggtacagttaaaagctggatcagacgtggtttacagcaattacagaggtgcttaacgttatgaattatgaaaaccaaaagcttatagacatgttagccgccgaatacgtactaggtacattgcgaggtcctgcacgcgaccgttttgctcgcttaatgctgacctctacacgtgccagagaagcaacttgggtgtgggagcaacatttaaataatcttgcaagttcaattgaatctgttccaccagatgatcatgtgtgggaaaaaattatcaatcgcattgaccctaatgttatccctataaataaaccaaagaaaacaaataggtcattactccaagcatggtcattaattgcctcagctgcatgtatagtcttagcattgattatttggcagccacagcaagagcttgctactggatcacaacaaattgcattatttaaaaatgaaactgagcagccactgtggtttattgatgtgaaagataaaaccttatctgtcaaagcatcaaatgttcttagcccaagatctgataaagactatgagctttggatgattttaaaaggacaagaagcaccaatttcattaggtttactacctaaaagtggcaacatagaactgataaaaaatagtcaatttaatgcggacgacatttctattctagcagtcagcttagagccattaggtggctcccctaatggctcaccaactgaagtactctacactacaaatttagtaatcctttaatataaaagccgtgtttaactcggcttttaaactttttaaaatataattcaatttttttgcatccaatcttattaggtaaacgttttcattatgacttaaattaaaactaaggaaaaagtcatgaagaaagtaataccatccctaattacgattgcagtttgtagtaccttatttacttctatatctgaagcatctagccatcgtgaagcgccaaatattacgcgctttccaacgttagattcgacagacttttatgcctttaacagttacgaagaaggccgaggtgactacgtaacatttattgctaactacatcccattgcaagatgcttatggtggtcctaactacttcgctatggacccagacgcaacttatagcatccatattgataacgatggtgatgctattgaagacatgacatttgcatttaatttcaaaagtatgttgccaaacaataatatgggtgtagcacttactgttggacctgaaggtaatcaaagaacagttgcagttcctctaaaaaatgtcggtggtgtttctgcaggtaataattctgccgttaatttcagtgagtcatatactgtgagtgttatttctggcccacaacgttctggcacaaaaagcatgctgactaacacctccaatagcagcaatgatttttataaaccactagattacgttggtaataagacattctcatcaatggcttcataccaagaatacgctgatcaatttatttataatgttgcacttccaggttgtgatggcatgggtaaagtgtttgtaggtcaaagaaaagacccatttgttgtgaatctaggcaaaacatttgaccttgttaattatgttccagtcgaaggtgacagttcgcctggcgcaggcgatggtgaagggttccctggaggtatcactcaatcagccgataatgatgatttagcaatgaaaaatgtcacttcaatagctgtcgaagtaccaaaagcctgtgtaacaggtgaaggtaatggcacaattggtagttggacaactgcaagcttgccacaagcacgtatattaaacccgaatgcatcatttgctaaaccagcagtaaatggcggtgcgttaacacaggtttctcgccttggtagcccattggtcaatgagttagttattggcttgaaagacaaagatacattttcaacatcagcgccatctgatgatacgcaatttgctgattatgtaacccacccttcactacctgagcttttaaatatcttatttaaagatgctgtgaattcaacgttgggtaccaatattgaaacattggcacctactaacttcccaagaaatgatttagttacagcatttttaacgggtttccctggtgttaatcaactttcaactgttacgccatctgaaatgctgcgtttaaatacagcgatcgctgcaactccacaaaatgagcaatcagcttttggtgtagctggtgatgatttagcaggtttccctaatggtcgtcgacctggagatgacgtagtagacattgcattacgtgtagtaatgggtcgtttatgttacccaatcccagtgaatggcacagatactgatcttggcttgtgtacagcagaggatgcaagtgtaggtaatgttccatttacagatggtgcaccacttgatgcaagtatgatggatagcagttttccttatcttgctaccccgattgctggctctaagtaatgaggaaattaatgatgcgtaatttaaaactctcaagcatcacactcattattatcacaggattattaacagcttgtagtgataatgacaaagatgacaaagatgacaaaaatatgatgaagcctgaacctgtcaataatgcaccaagcgctgttgatgcaatggttacaacccaaactgaagtcgttattaacgatatgcttgaaggctcagaccccgatggcgatgaattaacgtacagtttagtcagtgaaccaaatttaggcaccgtaaatgtaaattctgatggcagctatagctacacacctaaccctgagaccgtaggttcggatagttttcaatttgcagttagtgatggcgttaatagtcaggctacagcgactgttagtatcaccatagaaacattgcaagttgatttttcaaccataggacgggccgcatttaatcaagacccaagcgcacagcccttaagactcaatggccgtgaatttataaatacgggtaatgatgcaaattttgatgatttagtgaacgggaattagttaaatcttggccacggatggcttatctttggagaaatcatgaaatatttattttacattgcgatggttattagtgtctttgttcatgctgaaccttatactccaaaagattcagatgtcatagccgtttccagcaagaagatcaaaaccgactttactaaagcacagctgaacaagtttttttcagaaagccaacatgttggtaacaccgaaaggaatcaaggtattttaaagcgttacttagagcataaagttacacagtccgatgatcctgatatacattacttttatgcacgactattacaacgtgaacatcaatttgacgaggcaattcggatcctcagtgatgtaaccgatcaagctcctcagcacgttaatgctattttacttaaagctagtttattgatggtaaagggtaaatttaatgaagcgctaggtcagtgtttatcattgtttggcttggcaagcattgaaacaatatcgacatgttctctagatgttaaaagtcaaaatggagaactgaaacaaagctatgaagggcttcaaaaaatagcgagctcttcatctatgagtattaatactcgtcatgtactcgctgaaatggcatatcgattaggctacacagaacaagctttatcatatcttagtagcgttgatttaaaaacggcacctgtaagtctagtggttctttgggctgatgcacaattagctcaaaaaaatggctcggcagtgctttctactttagccgttttaacatctgaaaatgccaaccttgaagatgctattttactgcgtttagcacaagctgaaaaagttaaaagccaatcgactaaatggcaagaacagatggcaaagcgagtaacactcagagaattgagacaagacacctatcacgcaagtgatttagcttggtattatttaactataaataggaatatgaccaaggccaagtattgggctcgaataaattggcaacaagcgaaactacaaagcgataaacgtctgcttgaactcacagggctcattaattgaggaaatatatgaaaatcttatcatctgtctttttaattcttttggtctttagttttgaactaaacgctcatcaacttagtacggcatacttagaattaacgaagtccgaaaatgaacaattaactttaaatggtcaatggaaagtggctgtgatggacttagaacacgttgtcgaatttgataaaaatgcagatgacgtgatcacttggcaagaaattaaaaatcaaaaaggagctattcatcaatacctagttgaaaagattagcgcacagcaaaataatgaattatgtgcaattaacagtgagggtgatttaaaaattgactcacattttaatgaatcatatatcgttacccctatacacattagctgcccaaatagccaaagcttttctataaattacagtgcattgttcgaagtcgatgcgaatcacaaagccatttctgcaattggaaatataagccgggtttttactttaaatgaacaaactcaaatttttagttttgatgaaacgagctatttagaaacgtttgttgaatatgtacagcaaggcatattacatatttggatgggcacagatcatatcttatttttaatcgctttattgctgggctgtgtgttagttcgtaagcaaggacagtggcaacgtgtcgagtctaaaaaacaaatccttgttgatactgcgtggatcatcaccgcttttacacttgctcactcaatgaccctaacagcgactgctatgaatatcatatcgccaaacacccgatgggtagaattaggtatcgcgctttctgtattatttgctgcaataaataatatctggccaatgattatccgtttaggttggatcaccttctgttttggtctactccacggtatggggtttgcaagtgtgttaggtgagcttggtttatcaaatgaataccagctaatgagtattttagcctttaatttaggggttgagattggtcaactggttattttagcaatctgtttaccactactaatgctacttagaaataactcctggtacaaaaaagctattatgccagcaggctcagtgctaattgccattatggcaatccaatggtctatagagcgcttttaataagcgctttattcaaagggtaacaataaggttttcatcgctggacgaagtgcttttaaaagctcactgatgtttaaagaaggattaagcattttacgtagtagtaagccccccatcacagaaaacatcacttcaatacgggcattcacttcttcaagtgcggtaccttgtaacggccctctttcacccactaataattcgcgcatagaatcacgggcgtggctatctgactcacgcagtaagttagctattttttcattgcgcgcagcttctgcgagcatttctaaatcaagcgcaccttgatttaaatcggtatggcgctcaacacctctatcgagtccatctagcaacacggtgacacgatcgcccggcttatctgcaaactctttaaagattgagaacatttcttccatatcacgctcaacaatcgattctataatcgcttctttactagcgaaataattatagatatggcctgcgctcatgcctgctgttttagaaatttcagccattcccgcgccatgatagcccttacgtcgaaaacaatccgctgcagcacaaagcacttgattacgtcttgcctcagcaagcgcagggtcattgtgtcttttcgttttttgcgtcatggtttctccaagctcttttgaaatggttaacttttacttaaacaaggtttacaggatcttaatatcacaggagagtcaaaacaactaagatcctgcaaaaccttaaataaattatgcttttgctgttttaatgcacatttttttgcgcattccagccaccaccaagtgctttatacaaattaatttggctagcaagatacgcttgtttacccaaaattaactgttgcccagcactgtaccaatttcgttgcgcatccaacacttgcaagtaactgtctgctcctttttgaaaacgcgcatctgataaagtaaaagataactcattactttggtacaaatcactgagtgcatctagctgatgcatataaccttctcgatcagcaagggcatcagatacttctttaaatgcttgttgtatggtttgctcatagctagtaagcgccatttcttgttgtgcctttgcaacatcgagattggcttgattacgacccatattaaagataggtaagttaatcgatggtacaaaactccatgtacctgagcccgaatcaaaaagattactcaaatcagcagaggccgttccagcattggcggttaaacttatactcggatagaatgccgcttttgccacaccaatatttgcattagctgccaataaatcatgctcagcggccttaatgtctggtcgttgcgtcagtaactctgacggcaaccccacaggcacatccggtaagttcagtacatcatctatattttgatttggtagtaaatcagcagtgacggttttacccactagaaaatcgagagcatttttatcacgctttagtaagcgctgatagtttgcaatatcgaccttagcggttgctactgtactttccagttgcgatagcgttaactgagacgcagcgccaagagcaaatgttttacgggttagttctaaagactcctgctgagactttaaagtctcgtttgcaagcgccaatagctctttatccgtcgcatagttaagccacgcattcactaattccgaaatcaagctaatgcgcacactggttaaactgtattcagcggcatagaggttttgtaaagcttgctctgattggttgcgcactttgccccaaagatcaatttcataagcagttaagccaacagtcgctgaatagttttcagaaatagtcgcttgaccagtaccagataaatctgccggaagacgctgacgggttcccgctgcatttaaatcaatgcttgggtaaagcgcagaatcttcaatctgatacatcgctcttacctgctgcacattgagtgcagcagttttaatgtctttgttgttttcaagcgttagcgcaatcagctgttgcagctgagcattagtgaaaaatgactgccaattaagtgcattgatatcacctgcagtaccttgaacatcatagttttgagcaacgggtaattcacgctgctccatatctggcgccatattacaggcagataacataagtgcagcaacagacactgagataagtttagctttcattatgcctgctcctctttggttgactttgttttgccagggaatacacggcgcaccaatacaaagaacaatggcacaaacaacacaacgatggtcgatgacgcaagagtaccgccaataacagcaatacctagcgcgttttgtgcacccgaacctgcacttgatgcaattgcaagtggtagtacaccacacacaaatgccattgatgtcataaagattggacgtaaacgaaggcgaatagcagcaacagcagcatcgacaagtttcataccctcgtccattttatgaatcgcaaactctacaattaagatggcattttttgatgccagaccaatagtggttaatagacccacttgtagataaatatcatttgataaattaaatacaaatgaggcaatcgatgcaccaaataccccaagcggtacaattagcataaccgccgcaggcacggaccaactctcgtataacgccgctaaacaaaggaatacaactaacaatgaaagtgcataaagtaatggtgcttggccaccgcttaaacgctcttcatatgaaatacctgtccattcgaacgccacacctggcggtaacttcttaaccattttctcaacttcggccatcgcttgacctgtactataacccggtgcagcagcaccttggatttccatcgctgagaagccgttataacgctcaagacgcggtgagccataagtccaataagattgagcaaacgcagtgaatggcaccatatcgccattggcattgcgcacgtaccatttgtctaaatcttctggcaccatgcgtgattcaggcgtaccttgtaaatacacttttttaacacgaccacggtcaataaagtcatttacatagcgactaccccaagccgttgataacgtattattgatatctgcttgagtcagacctaatgcttcagctttggctaagtcaatatcaagctccagctctggtttatcttcttgaccatttgggcgcacacccgataacacagggttttgtgccgccatacctaaaaacatgtttcgagcttcaagtagtttgtcatgccctaaaccaacacggtcttgtaggtataaagtgaaaccatttgcagtaccaagctcaacaaccgctggcggtgggaaagcaaacacaaaggcttctttaatagttgagaagtatcccatggctttaccagcaacagcgcctactgataaatcaggacgctgacgttcatcccagtgttttaaaccaacaaagccgattgctgcgttttgcccagaacctgcaaagctgaaacctgttaccgtaaagatagattttaccgcttctgattgctcttctaagaagtggtgttccatcttttcaacaacttttaaggtttgttctgttgttgctccagcaggtaggcttacttggttaaacaaaatcccttggtcttcatctggtaagaatgccgatggtaattgtgagaaaataaacaccatgccacccacgattaaaccgtaaataagtaaatagcgtttactgtgtttgatcatacgagacacaaaaccttgtgtacccgagtttgttttatcaaaaccacggttaaaaccaaggaagaaacgaccaaataaagacttatcattatgaacatgacttggttttagcattgttgcacaaagggccggcgttagaattaacgcaaccagcactgataaactcattgccgttaccaaggtgattgagaactgacgataaataacacctgtagatcccgggaagaacgccataggcacaaatactgccgagagcaccatggcaatacccacaagtgcgcctttgatttcatccattgatttacgtgtcgcttcaagaggagacaagttctcttcggtcattacacgttcaacgttttcaacaacaacgatcgcatcatcaaccagtagaccaatggcaaggaccatagcaaacatggtgagagtattaattgagaagccaaacacttgtaagatggcaaacgtacctagcaatacaacaggtactgcaatagttggaataagtgttgctctgaagttctgtaagaataagtacattaccaagaataccagcacaacagcttcaattagagtgctaactactttctcaattgaaagtgatacgaacggcgttgtatcgtaaggtacaaccgtagttaaaccttcagggaagaaaggctcaagttcagcaagtgccgcttttacgccatcagctgtatcaagtgcattagcaccactggcaagcttaacacctaaacctgatgccggtttgccgttaaaacgagcgacaacaccatagttttcaccgcctaattcaacatcggcaacgtcacttaaacgaacaaccgagccatcagcattggtttttacaaagatatttctaaattgctcaggtgtttgtaagcggctttgcgcagtcactgttgcattcagttgttggccactcactgctggcaaggcacccagttgacctgccgacacttgtgcattttgggcactgattgcagcgctaatatcagcaggagttaatgagtacttaagtaatttagctggatctaaccaaatacgcattgcatattgcgagccaaaaagttgtacttcacccaccccgttaacacgagaaataatatcaagtacgttagatgaaacataatcaccgatatcgatgttgttcatgctaccgtcttcagatacaaagcctacaaccattaagaagttacgagccgattttgcaaccgagacaccttgacgttgtacttcctctggtaataaaggtgttgctagcgacaatttgttttgcacttgaacctgtgcgatatcagggtcggtatctgcactaaaagttaacgttaaagtcgcagagccgttcgattcagaggttgacgacatgtagagcaagccatcgagccctttcattttttgttcaataacctgtgtaaccgtatcttctaaagtacgggccgacgcaccagggtatgaggcttgaatactaattgcaggcggtgcaattgatggatactgcgcaaccggcaaacttctaattgctaagatacctgccagcataacaacgatagcaagtacccatgcaaatatgggccgatcaataaaaaatcgtgacattaagtttctccgttactggctgttagctactgattctgctggcattgcgtttactggggcacctgggcggattttctgtaaaccttcaacaatcagcttatcgccattatttaggccatctgtcactaaccagtttgagcctacagtacggtcagttttaagcacgcgcgcttcaacggtgttatctttacttacgaccatggcagtaggttcacctttggtgtttctgctcacaccacgttgtggtgctaaaatcgcatcacttttcacaccttcaacaatcactgcgcgaacatacatacccggtagaagtaatttttcagggttaggaaattcagcacgtaaagtcacagagccagtacttggatcaacggttacttcagaaaattgtaatgtgcctttgtgttgataagtgctgccatcttccatttttaattcaacttttgaatgtaaagcggcatctttatcaagctcacctgcggcgatagcttttttcaaacgtgttagttcactgcttgactgggttaaatcaacatagattggatcaagctgagtgatagtagctaatgctgttgcttggttagcgctaacaagggcaccggcagtgacatccgatttaccaatttgaccactaattggtgctaacactttgctgtagtttaaattaatttcagcagttttaagctgtgcttgagcagtcaataagtcggcttttgcacttttgtatgccgcatccgcttcatcataatcttgctgactgacagctttgatattcaatagctctttatagcgttcagcttttgctttggcattagcaatacttgcttgagctttagtaatagcggctttgctggtagcgacctctgcttcaaatgtagatgggtcaatttgatataaggcttggcccttttctacttcagcaccttcaacgaacatacgagactgaataataccgttaacctgtggacgaatttgcgcgatacgtgaagcagccacacgacctggcaattctttagttagcgtaagtggtttgctttgcatctcaataacaccaacaggtacagcttgagctgcctgcgattgcccttgagccgattctgattggccgcagcctgataataaaacagcaccagccaaagctgacactgcaaaaaatggaatgcgagagcgctgcatgtgtagttccttattttagagtgaacgatcattctaaactaaaaaaggcacagatcaaccacctttaagtatctttacattaaatattttgcttgctttgcagtgtgttttttgtgcaacaaataaattgctaattgaataatttagcagctagttaagaaaatcattttaaaactatcagttagaactgcttgattagtcacctaagcacatacccattgctcgggcacttgttattaaagaatgttctagagggatgacgcgatattcagaagttgcttcttttaaactgattggtttaatttcaccctctttacttacggggataaaaccaaactggcctttcttaacaagttcgaatgcttgcaccccaaactctgctgcaagcaccctatcaaacgcattgggtgtgccaccacgttgaatatgccccaacacagtgactcttacatcaaggtcaagtgcaatacggatctgtgaggctagttgctcagcaattccacctagcactgggttttcgtagccaaactcacttgattgtttacttacaacacttcctgcaacaggtttagctccctctgaaataacgatatttgcaaatccatggccattatcaaaacgtgatttaagttttgctttaatcgcttcaatatcgtagggaatttcaggaataagtgctacttcagcgcctgctgcaattgctgaatgtaaacaaatccaacccgcatcacgacccataacttccgtcacaatcacgcgattatgactttgcgcagttggtattaatcgatcaatggcttctgttgcagtgtcaacggcagtttgaaaaccaattgtgtaatcagtgccatataaatcattatcaatggtttttggcacgcctacgatatttaagccatgctcaaataaatgctgagaaattctgtgagaaccatcgcccccgatattaatgactgcatcaaaacccaattgtttaacaatacttattaactcatctgaacggtcaataaatacttgctcgcctgctatctctgcaggaaatgcggtaggattccctttattaactgtttctagaattgtgccgccacgaacatgaataccggccactacttcactagttaagtgaataatatcatttggcttttcaagtacaccacagtaagctcttcggcttccatatacgtgccaattgccatcatgttcggctgctttaaccacagctctgatcaccccatttagcccagggcaatcacccccacttgttaatagcagtaattttttcattctatgaccaacttcgttcactgattaattagagattagcttatatgttgaactttcgcgtatgacttacatcaactaaagttcggttttttattattagaaaacagcgctacaaaaagtattaataatagatacttaggcaaacttgcaagcaaagtcgtattatcaaaatttgcagaaaagctgttaacagcaaaatataaatgcagtgctaaaaaaggtgtcagtaatataaaatatgaatacgctttgtcttttaggtagagccatttacttaataataagaacacaaaaagtaatgctattagtgggatacctaacgtaacaatatcagtcactgttaaagcaaatttaggtgacaaatcattaagaggtgtaagagtttcgctagggatcgctaaagctgagccaacccctactactggaatagataaataagcaaacaaacagccaaaaataaataaaagtagtagattatatttcattaactcattccatgatttgttcgttattagtgttacgctaactaataacgaacaaataatctactactttttcagtaatttatagtgttaaaaggatttaacactaaaggctagattctctacagcacagcccgtactacttttattaacacggtagtaatgcgtaacttcagtagcatttaaatcgagtagaaactcatcatgctgggctacagcttgttgctcttgagttaaacacatagcttgcacaagcgagcgcaatttagcatcagagaaaatagtgccaaaacgctgcatcggtaatcgcggaattttaatactaggcagtgcattatcaacagttcgcttcgcaagactaaaaccatcctttgttacatcaataaccgcccctgcaggccaataactgattgctcctttgtttttagcgtctgattgaacatgtactacaccacttttaccaatcaccgtcattaatgcagtttcacctgctcgaattgatacaagcgccgtagtttcatcaatgccaaaaccatgtttttgccctgaatctgccagtagtctagccaagcgcatggttctgttgcgctcgctaaaatgagtatctagaaccccgtaagtaaagctacctaaaccgccttgtttttcataggttaatgaatctgctgaaaggctattatcacattcatttttacagcgctcactcggtggtgaaacagcaaatgctccagctcttaatgctgctaaactagtcccattagaaatcataggcaccgaaccataggcattcttaccaccactttgcacggctgttcctgcacttgtgccaacaagtaatggcctttgtaagattgcgtgagtccaagggtattgcttgccgttatcatcaaaaagcacctgtctagttaagctctgatcaccaccgttaaacataatgcccgttgcgttttcaatcagtttaactaaatgctctaccccttgatcacaaagcgctttttcggccttaattcggtcagggtaaatagtctcacggttaaaaacagccattgtctcagtacgtaaagcatctaaattctcacattgcttactggtaatcgctcttgctaaagccggtgttaaaggtaaccactttgattcgacatcattaaagcttaataatccttcataaaaatctgctgattcataaggatctctgcttgaagctgtaaccgctaaaatggttggtgattcatccgttgtttttaacgaagcagacacaaagtctaaaatatcacttgctgcactttcattgttatccggtacactaacttgctctttttgtcttgtagaatcggctgttaacacaggaacttcgagagtatctagcacgaagttatactctttatctgttaacgcgttcaataacgtattatctaaatcacgccatgcccataaaatatcacttttagtgttcacatcagactgttgacgtgcaatctgtgctaacaccttaagcgtttgctggcgatttttttcattatttgttggccagtttgtctttattacagataaagcatcattatttaatcgaaattgattagtttgtttaccactgatctgtttattagaaaggcaatttttagggctcatacttgagcaggttgtcaatgccccaccaattaaaactaacgtttgctgttgctcacttgcataaactttactgccaaatgacgcgaaaacaacactaaataccccaaaaataaacccaatgtggtatttagcactttgctccttaaggatgttcatattgttacactcttgtaaaaaaatattagaaaattacttgcacagctttttgttgcttgctataaaaaaaaggaacatttaaaacgcgagtaagctagcactgtattactagctttgtcaaaagaccttacggattggaattatgttgaaaaacgcattatcgctttgtacatatttctactctccacactacctttcggagtggtttgacgagtagccacacctcacttcctgtgaggggctagttgtgtttataacccactgccctgtctaaaaaaattataacaattatttaaaatgtcacggttttgccgtgggtatttaataccaattcgcttaattaagtatttttgcggattggtataagacaaaggtaaatcaatatgtttcgtcagttatcaattgctgtagcaatcagcgctgtgctgtgcccagttcatgctgtgtatgctcaaaacgaccaacaatcagaaaaaattgaacgagtagaagtaacaggatcacgaattaaaggggttgatctagaaggaaccatcccgcttacagtgcttgaccaagatgcaatcaagcgctcaggagcgaacactattcatgagttattaaaagatttatctgtattcaaaggcggatcaggtaccttttcgacatctgaaagtggtggtacatcaacctcaacgccagcgggtcaatctgctgccagccttcgtggtatggggccatcagctacattaacactgattaatggccgtcgtgttgcgccgagctcgttcgcagcaggcactgaaaattttgttgatgtgaactcaattccacttgccgcaatcgagcgcattgatattctcgccactggtgcatcggcaatatatggggctgatgctgtcgctggtgttattaactatattcttaaagatgactttcaaggagctgaagtaaacacttcttacactaatagttttgacagtcatgacgaaggtaagaaacaacttaacttagtttacggcacgaatataggtgagagtaacttaacggtatttgctgatatttacgaccgcaatgcctttaaagcgaccgacagaagctataccgcaaccccaaatttagtgaatggttactcatacttacccaaacttgagaactcgccaaacatttattactacagtagtcgagatggtaatgagctacctgcgccaaactgtaaaacagaacttgttacgactgagtatggcgagcaaatttgtgcttactatgctaaccaagatgattacctagaaaccccatttgaaagcctttcaactggctttatgtttaacagcaccttaggtgatttagattggcataccgatttcttctatagccaaactaaatcaaaagcctattcatcacctgcaccaatcaatcaaataaacgacgatgatggtccgtttatcatagaagatgcgctattcatttatgataacgctgatggcagtaacgacttaatggaccagctttatattgatccatttaccactcaagcgggtcgagaagtgtatggctttgcatttgatgcgcgctttaattcaccacgaacggttgaagtcgaaaccaaaaactttcgcttagtcagtagccttgccggttacattggtgattggagttgggagtcgggagtaaccttctctcgctctaagtcagagcaacaagcaattgatggtatttataaccgctatcaatttcatgcagctatcactggtgaattatgctctgacggatcattagctacatacgatgaaacacagctcaattgtgcacaaggtcagttaatgccgttctacaacccgtttttacagggggatagtaataacgatgcagtgcttgatcttgcaaaggcaaacccaagtagaagcggtgaaagtacagtatacggttgggatttaaactttaatggcgatttttttacgtttaatgagttacccatttatgctgcatttggtattgaagctcgacgagaagaattaaaagatattccatcgttagactcacaagcccgtcctgaaaatggttatttggtagatgtatttggtttcggctctagcttgtctgaggccgatcgtactcagtacgctgcatttttagagttgaatgtgccactcactgagcagctagaactgcaagtcgctggtcgctacgatcattacgatgattttggaggaacgtttaaccctaaagttggtttaagctatcgtccttcagattctcttatcattagaagttcttggtcaacgtcgtttagggcaccttcattaactcaagcaggtgtaaaattacgtaccacacaatcacgcttcgattgcggtgctaatcaggctgttgcagatttatattgtatgggtgatggcaccgaggtcagtgttaacagcctagaactcggtaatcaagcactcaaagccgaagagtctgaagcgctcagcattggctttgcatggagcccatctgtaaatactaacttaacggttgattattggcattttgatcacgaacaagttatcgataccaatatgactgccgtgctagatagagctattacagatgcttctcttcgtcactgtgggctagtaccacaaggtcaacaaggtatttcgtacgaggagcagctgtgtgaagtaaccgataatgctggactcaatatcgaaagtgatggcgctaacctttcagagatcctcacaaactatattagtgagtttaacccgcgagaagatgagctattcctgccattatttagagaccatgttattcctcttgaaaataccggcacccagacattagcaggtatcgattttaaatttgatcatcgatttaattttgcaaaaggcaatttaacactcgcattcgatggtacacactatttagagtttgagcgaaataaacctggctcagatgcaatcgaaaaactaatcggtacttatcgctaccctgaaaatgtaggcagattttctattgattgggaagctgagagttattacttaaatctcggtgccaattataccagtagttatgaggatgatatcgaagggctgcgtggtcgtgaaatagacgaactagaagagcttggagagcttaacgaggagttaaaacgtgacgttgatgactggttagtatgggatttatcagctggctattttgtcaatgatgcattatcaatccgcgctcgtattgataatatcttcgataaagaaccccctaagctatatggctcaagccgcgggtttgattcaatcaatcataatgcatatggcactcgctatacgttgagtctgagctatcgcttttaacattaatgtgggcggctctatgtcgcccacattgctaagtttgtgttatcaataactcaaactcgcggctctcagtgttaatctttctcagcaagggctacaataccttgcttttctcacattcttcgaacaatcgttaagtgactttatgaaaaacaaacagtttgcgatgcctgatgcgagcatcattttgttatgcgtcgcagtcatcgcctatttagccagtttatttataacacccggtgtgtttaatgccgaacaagatagtcacagtgttgaattatcacagtatcaaaaagcaacagaacacacaccacctgccctttttgcagaaggaggaggcattggtctagccaatgtattgtttgaaggcttagtctctggtgataaatatggtgcagccatcggggtaatggcatttattttaatcacaggtggcgcctttggcgttattttaaaaacgggtgcgattaataacggcattatggcgctgattaataaaacacaacacgtagagtggatattcattcctttgctatttgtgcttttttcattaggaggcgcagtatttggcatgggtgaagaagccatcgccttttgtattgtgttattccccattatgaaacaactcggttatgatgcaaaagtaactgtattaacaacttatgttgcgacacagattggctttgctacctcttggatgaacccatttagtattgcaattgctcaatcgattgcagagatcccggtgttttctggtgccggattcagaatggttgcgtggctggtttttacctcatttggccttctatttactatccgatatgctaattcaatcagatcggcaaagaacctaagtgctcaagaaaataacaagtcaattagcttagacagcgcagataaacttatcttaataacctttattgcaggtattatttgggttatttggggtgttatggcaaggcagtattatattcctgaattagctgcgcagttcttctgcttaggtgtagcttctgctgttattgctagtctatttaaaaaacaaacagcaaatgaaagcgcaaatgcatttaaagagggggcacaagaactcctgcccgcagcgcttttggttgctttagcaaaaggcgttattttaatacttggcggtagcgatttaacatcgccttcaactctaaatactttgctttactatagcgccaccagcatatctgttgtaccagactatatcgccgcttggggtatgctattatttcaaagcgtgtttaacttttttgtatcttcaggttcaggacaggcagcaatcacaatgccgctaatgtcaccactgggtgatctattaaatatttcacggcagattgtagtgctggcgtttcaattaggtgatggactaaccaatatatttattcccacctcagcaagcctcatcggctgtttaggcattgttaaacttgattggagtgagtgggcaagctttatttggcgttttaccttagcgctatttggccttgctagttgctttatttttctcgcacattttattaactatcagtaaaagatttaattatgttaacacttataaaaggcgcagatattttcgctccttcgccgcttggaaaccaagatgttttaatcgcgggcggaaaaatcgtggatatacagcctgaaattaatatcgaaaattatcatggtgttaccatcgttgatggatctaattgcattttaactccggggtttgttgactctttagtccatataacaggtggtggcggtgaggctggttttgctagcagaacacctgaaatgaacctaacagatgcaacattgcatggtacaacaacggttatcgccgcgcttggtactgactcaagtagtcgaacccatagtaatttaattgcaaaagcaaaagcacttaaagaacgaggattgaacgtattttgccatacaggttcatatcacttacctgctaaaacactcactggttcaataacgaatgacattatgtatattgaggagtttattggtgtcggtgaagtcgccatttctgatcatcgcagtagtcagccaacggctcagcaacttgctgaactagccgctgaagcaaaagtggctggcatgttaagtggtaaaaaaggcacggttagtattcatgtaggtccagtagatagtcacttatctttattacatgagatagatagcttaactgatatttcgcttagccagttttatcctacgcatatgaatcgtaatcttgctttactcaatgcgggcgtggcgttttgcaaagcgggtggcactatcgactttaccacaagcacgacagagtatgatcttgcccatggtgaatattcagccgcgcaggcactggcttactgccttaaaaataatgtacaaccgactaagctcactatgagctctgatggtcatgcaagcttacctatttttgatgataactttagtctattaggtcttgaagttggtaaagaatcaacattgcatagctcgtttgtagaagccgttcaagaatatggtgtatcggttgaacacgcattaatggctattacctcaaatccagctgatgtgcttggtattaataaaggtagagtgactatcaatgcagatgcagatctggtgttacttgataatgcatcactgcagcccattgagtgttggtcaaatggcgtacacatggtgcatcaaactaaggcaaaagtgaaagatacttttgaataaaggctgcacaagcagccttaattgctttcttctgaaattcgagtaactaagagttgctcgaccttcactccttcaacatcaacaacttcaaatttaaacccgccaaagtgtataaactcggcgcgcttcggaagtcgcttcatcgtataaataaggaatccggcaacagtttcataatgtgattgatcaggaaactcttctatctctagcactttagcaagctcaaccacaggtgtcaggccatccactaaccaagaagtgttatcacgttgaataattaactcttcgccctgatgactgatcaaatcacccataaagcctttcattaaatccttaacagtgacaatgccaaccattagtgcatattcgttaacaacaacagcaaatggctcagctgcttttttaaaggtatttaatgcttcagaaagactgagtgtttctggtaagtaaaaaatatcacggctgattaactcactatctatctcagcagtttgccctttaagtaccttacgaaggatatcttttgattcaaccgaaccaattaatttgtctaaactaccatcacacactaaaaagtgattatgcgggtgctcaataattttggtagcgacttcttgggcatcagcttttacatcaaaaaatacaatttgatcacgtggagtcatcacactcgataaaaaccgggcctccaaatcaaacacattgcctattaactcatattcctgttgctgcaggctgccatattcagccccagcatccatcatagcaacgatgtcttcagtggtaacaatatcttctcgttcagccggaactttaaaggcgcgtaaaataaagtttgtagtgccattaaagaacacaacaaatggcgttaatgcaaaggtaacccagcgcattatagacaccacattgacagcaacagcctctggcataatcatcgccaggcgtttgggcagtaaatctgcaaataaaatgaataatgaggttatgctaaaaaacgaaatcaaaaagctaatttgacttagtaacgggccttgataaatcatccctaaaatttgttcaatataaggtgataaagcttgctcaccgacaataccacctaaaatagcaatcgcatttaaggcaatttgtatcatcgcaaaaaatgcccccggctgctcttgcaacgttaatactgcctgggctttcttattgccttcgtcgaccatgacccttaattttatcttacgtgatgcagcaatagctatttcgctcattgcaaacaacgcactgatcaaaattaatatcataataacgagtaagtcactcattgtggctcctagtaaaaagcattcagactgttgaatgcaaacaactttttgctcacttatgctgtttagagtttggcgagaatggtcaaaaagcagctgattataactgctttatagcaatcaacaagtgctattttaaatcactggaaacaaaggctttattgagcttatctaaagtcactgggtcgatatttctgttacaagcaaagtataaatcagcgcgtgcaacaggtagctgataaacaggctctagaaaagaaaggctttgatcatttttgctttcaaattgatattgttggtcacttaataccactaaatcaacagttgtacgacgactcttgagaatgtcgtaaatattttcaaagctatcaagcaggattaactgtttattttcattaaaaccctgctcttttaaataaacatgggaatagttattttttagaactgcagtacgatattttttcgcatcatcgagattattgatactcagccgatttgatttaaatgcataaaaagatgctgaaaagccttcaagtttatgtatccacttaaattttttctctctggaaggaatacgtgctaatgaaaaaatacacgtgtttgcgtcacgtaaagcagcattgtatgtaattgaccaagtattaattgatatatcgtactgcatccctgatttttcgagggcagctttaactttgcccacgacagagccaactaactcaccttgttcgttctgatattggaagtttggaaagttttcagttaccactgttattgctgcaaaactaggtttagcaataataagcaataacaaggctagagatttccacatcgcagacaaaccaaatttataattattttttataataatatagcgtgtagttaggaataatggaatgtttttaagactaaggaatgagtaaggggagtaacacactcccctgttgcatcaaggcaaattacttgttcatcgcagcaattaaaaaggcagaaatttttgcaccttctttaagcgttgtttcagaactcgtttgaccaatcaaagagctgtctgtaaatggtgcaatttccatcatatcagccccagtaattggaaactcatcagctaaagcaactaaaatgtctaatgcatgctgtggtgttaagccaccggcttcaggtgtgcctgtcgcagaagcaaatgcttcgtcaagtgcatcaatatcaaagctcacataaagctcatcaactttatcagctttaagctgggcaattacttcttcagcaacagctttagcaccgcgctcgataatttcatgtgcccaatgttgcttaacaccaaaagtctcttcccagtgctgtttcggtttaccacttgaacgaataccaaattgaataaggttacgcggtgcaggtaagtactcaaggatatgtgtacaccatgaaccaaaacataaatcgatacctaagcgctctacaagtaaatcagtgtgggcgtcaaaatggataattgcagtgcgtttacctgcatcacgctttgcttttaaatacgctttagtcagcggataactgattgaatggtcaccgccaatcccgaaaatacctttatctgggtagttggcataaaacccatcacagacatcttcagtgatagacaatggtgatacatggtattcgctgttttcatcagcatagagtgctttttgacagtttgtgattgtagcttcgtttaggtatttatcatgcaataaatgaggaataacacgaacgtcacctaagtcgaacgcgcgagcctgtggttgttgatcaattaggctagaacgtaaaaataacgggccccagttagcaccacgtaaaatacccccaccacaatcagagctgatcccaagaatcacagctttatgttctgagtcggctagtgtctctaatgactctttccaaagaacgtctacgttctctgtctgaccgtataattttgttcgtaaggcatctttacgttctttcgctgtatttaccgtaaaaacaccatcgcctggtgggcaaagacattgacttagtttttcgtgaaatgctttttgtgtgttactcatttctactccgctgctaaataactgcatattcattcgtaatcgttaaaattacgctttctcataatctagaaaccgcgatgcaagcatcacatttatcatgagaagaaggaaaaattaacctcttgaaatttatagtttattatttctaaagagacttattatgggtgctcaataactcaatgagcgtggtattttggcaggtataacatgcacggagggaaagtcaaattttgcagcaacccattagattgctgcaatagatttatattcaagctaggtgaatactcattattcgtaacctcttggcttcttagtttttatcaccgcaatgtaagcatgccaactcgcgtagctcaataatggcataataacaataaaccctgccgttccagtgacaaatcccagaaataccatgaatattattaaagcagcccaaacaaccattgcgcctacattggtttttactgcattcatcgatgagataaccgccgtcattatatctacgcgtctttccatcattatctgcggggtaaatgctgaaatagcaaagactgttaccagcaaaatgccgccaactatcgagccaagcgtaagaaacgcagatagctgttcaaagctaggatctacaacattcggatacagtgcgtggatcaatgcagcaagtctcatccacacaatcataatcaccattaataatactgcaaatccccattcaccagcggggtttctaaacattgattttaaactgtgcattaaggtcggtttatgccctttttctagctcccaagcaacatcgtaaagcccagccgcaaatgcagggccaataagagcaaagccaacaaccgctggcaaaatgacaaggtgtgtatcaaattgatacacaaagtacattattgctgctggtattagtgtaaaaactaaaccgtacactaagcttaggattggcgcattggcaatatctttaaacgctaaagcaagccaatgaaacggagcagccatagaaacatgagcactctctaaacagcgagcaaattcatgatgtttactcatagatgatgaagcaggcataataggtcctcttttatcgttacatctttaggtttaggttatctgtgcaaatcttgcaacattcgtaatctaataggacatctgtcctgtactttaaacacgtatgattaaagtattacgctttagacaaaaataaggtttaataatggaaaaggtatttcatttagggctcactcgtgaggacttaaacggtgcaacactggcaatcgtccctggtgatcctgatcgctctgcccgcatttcaacacttctcgataacccaaagtgcttagcgaagacccgtgaatttcatgtatatcgtggtgagttaaacggccacagcgtggtagtttgttcaaccggtattggtgggccatctacatcaattgctgttgaagagcttgcacagctaggtattgatacctttttacgcattggtacaacaggtgctattcaaccacacattaatgaaggcgacattttaattagccaagcatctgttcgtttagatggtgcaagtcagcacttcgcgccattgagctaccctgcggtatctgacttttttgcaacacaagctatggtcaatgcttgtgataatttaggcattaatttccatattggcattacagcttcaagtgacaccttctatccaggccaagaacgttacgatacctattcaggttatgttcctcgttcattacaaggcagctgtgaagagtggcaaaagcttggcgtgatgaactatgaaatggaatcagcaacacttttcactatgtgtgcagcacttggcttacgcgcagcgtgtgttgcaggtgtattagtaaaccgtactaagcaagaaattcctaatgttgaccacggcgagattgagaaaaagtcagtcgccgtagtcattgaagctgcaaaactattgctaaactaatctttaactagcttagcaatacagtgctcaaatgctggtgggttatcaaaacttgccagcacacttttagccacctcatactgattttcggccccttgtgtttctaacaaggtgatcgacttaaccgtcttatcatcaaactttaacccagcaagataaaactgacttaaagcactttgaagcggtgataaacttgggctgtaagccgcattttcagcatagcttccgtaaaaattaccgttttcaaaagtcgtgattttaacgctacagtagttcgcggtataaggtacgtaagcttttagcgctgtttcagctaatttctgatcgagctcattaacactatcgaaatgaccgtcgtttttttcctgtgagaataagctttcgttattgcctaagtctgttggcccaaacgaatacggcaaaagctcatgtaaagtaaagtgtctttcaggaagtaatatttcgagtgattgcgctgtgctgagctcattcataaactggcgacagtatccacaaggggcatcactgatcgcaattttatctattgattgagcaccgtttaaccatgcattatttatcgcagattgttctgcgtgaacaactaaacttagcgcttgatgagaaaactccacattagcaccaaaatagaatgtcgtttcaccttgctgatttttaccttgtgcaatagcaccgacgtagaattttgaaattggtgcgacagaaaacaaactcgcaacaggtacacacgcttttaaaagttgtgactctgttaactgatgttgctcacaaagtaataaaatatcagcttgagataagatgccacgttggcttttcaactgactaaaaagagattgcttttgctcatcactgaagtcaaaaggtgttgttcttgacacagaattagatacgtctttcctagttactgtcataacaaattataattattaattggctaaacagtttaaaaggttatgcatttaaatactaggtttcaacgcgctgtgtctcgaaatttacaacaaaaaaagtgttaaataggcattttttgtaagcgcaaatatacacagaaaatgaatttcagctggtttctctgtttattgatgaactagccaatttttagctttactaaaacactcaaaattctcggcttgaaggttgtaacgtttagctttttgcacaaataagtcatgcataaagccatcgaaactcaccacaatagctaatacagctcgctttaacgagttagcaatcactggcattatagtaaacaagtctgctggtgcgaagtcatgggttaactcagatacatcaacaagaattttttctgacccatataatactgaatattgatgggctatttggtaaaaattaatcacatcctgtgcacttgcagtccctcttaacgtcatcatcactaaagacgtcgatgcatcataagtgatgcacgttgacacgttcgacataggttactctaaaatgcgtgggtaaaggtaaaattaatggttgctgaataaaagccgggctattttatggatctgccttgcttagtcaatacctagcaataaaataggtatgaccagttgcaaagttcacacttaaggattggatttatgcctgcaaatgttacctactttcataatctatttaccttttgaacatgtatgagttttctaatccattattaagctttttcgtataactctatttctaattaaaatccataataaataacctcacatatgtagacgaaaggattatgcactttccatccttactctggtttgtataaaggattatttgtaatgaaaattcgttttctgttttatctttgcttgatgctgttcacaagtactgctctgtcacaagcaatcacagaaactgaatttaaggaaatagaaacctcaattactaaaacctatgccagctctcctaccaatgccctacagctagtcaattcattattatcctctgacacagtaatattttcattagaacaacgagcaataatcacaaattataaggcttggtttttacttgaaaacgatgaattagagcaagccatgaaaacactagttcatttcatggatatagcattacagtcgagtaataaggatttaatgtatggctacttaaacatatctggcggtatttatgcccgattaggcatgtatcaagatgcattacactattatagcgatgcattacctgtggcaaaaacaatcggaaagcaccttttacaacaaaccgaaatcaatattgctctgattaacctcaatttaaaacgttaccgtgacgctaccatcgcttttgaacaatacagagataccgcaaaaatagagaatcagcccctagatgagtcgtttgcaagtacccaccttgcaatggcgctaattggtttaggtgattttgatcatgcactagatgtattaaatgacgcgataatattacaacaacgccacggttttacggctcatctaagtaaaagttttgtattgaagggaaaggtattacgtttaaaaggtatgttaaatgaatcagaagaatttctaactgatgctgtaaagcttataaaaactcaagcctacagcggtgattacttaagtgtggttttatgtttagcgcaaacatacgatgcacaagattcagcgaacaaagctcttaatttactcgcttcgattgaaacagatacttttaagctctctgatatcacgactcaacttgaagtaaccaagttgactgcacaactacttgaaaagcaagaacagtatgctgaagcactgattgcatataaacactatgcacagatcaatgcggaaattttaaaacgccaagcaaatgttaatctagctaaagcgttagcgcaggctgatgcaaaagccaaagagctcaaaattgcagaacttacacgcgcagagcaagtaaaagcaacaaaagcgcaggcgtttaaagatcttactatcgtcatatcaatatgcttggtaattatcttgtttggttcttttatcgcgataaataatattgatatgcgaaaacaagaacttgaaaagatactaatacaattaaatgaaacgcaagatcatttaattgaaatcgaaaagatagcctctttaacctcattagtctctggcatggcccatcaattaaatacaccaataggcacaattgtcacagcaagttcactcatcgacgaatatttagagtctttgtcagataaatttaaacaacaaaatttatcaagcaaatacttccatgaatttattaccaacaccgacaaggccaaggatcttgttatttctgctattaaccgcttagcaggtattgttgaggaatttaaagcacttaatgtgtctattaacttagacaaaccgttatcgagtattccattaaaaaactttattcatcataaactagagcctatgagtaaatatttgggtaagaaaattacttatcatgttgatggagacagtgtagccattacttcctgcccttcaattttagaggatattctaaaaactctggttattaattcctatgaacatggttttacacatacagcagaaggaaaggtagacattaccatccgcgcaggtaatgacaacgtcaaaattatctatcaagacaacggcgtaggcattaaggaatcaatcctgcaagaaatttttaccccattctataccactaatttaggtggccatcacttagggcttggtttgaacgtggtttttaatgctgtgaaatataacttgaaaggcaatatttgcgccgtaccatcaaagcacggcgcacggtttgtgattacattaccaatcgatgcacgattagttgacgacatcaattaacctgtattacgcatacctgcagcaataccagtcattgtaatcattagggcattatcgatatcaccttcagagttttcatctgctgcacgtgaacgacgtaataactccacttgtagtaagttaagtggatcagtgtacgggttacgcagtgcaatcgactctttgatccaaggttggtcagcaagtaagcttttttgtgggcttaatgactgcaccagctcaattgcctcactcaattcttggcgaagcttcacaccaagtggtttatattgctcagttaccaatgcatcatcgtaatgagcacttaaccaactatcggctttactaaataccatttctagcatctctaaacgagcacggaagaaaggccattttaagctcatttcgtgaagtgtctcgatgccatatttatctaaagcagctttaagacctgttaacgcgcctaaccaagcaggcagcattaaacggttttggctccaagcaaaaatccatggaattgcacgaaggctttctacacccccatttgggttacgcttcgctgggcgagaacccagtggtaatttagaaagctcttgctctggcgttgccattctaaagtaaggtacaaagttttcatcatgacgcacaacttggcggtaatgctcacacgagtcagcactgataagctccatcacttcacgccactcgcttttcggctctggcggtggtagcaggttactttcaagtactgcaccggcataaatatttaaactttgtagagcaacagctggtaaaccaaacttaaagcggatcatttcaccctgctctgttacacgcaggccaccttttaatgaaccaggaggttgtgagcgaagtgcttgcgcagctggcgcgccaccgcgaccaaccgtaccaccacggccgtggaataaaataagctcaataccgcgattctcggctagttgaaccagcttatccattgcttcatattgtgcccagcctgcggccatcatacctgcatcttttgcagaatctgagtagccaatcatgacattttgttggttttgaatatgaccacgataccaagtgttatcaagtaaacattcaataacatctttaccattatttaagtcatctagcgtttcaaataatggcgcaaccggtaagttaaacttacagccgctttctttaagcaataactgcactgccagtacatcagatgcagtacgagccatcgaaataatatacaggccgaatgtttgtgcatcttgcgctgcaattacatcaaatgtatctagcacttcttgtacttcagggctcggttgccaatgttttggaataagcggacggcgagagtttagctcagcaagtaaaaatgcttgtttgtcttcttcttgccattgatgataatcacctaagcctaaataacgtgttaactcagagaaaacatcaccatgacgcgacgaatcctgacgaacatctaatttagcaaggcgcaaaccaaagctgttaatacgacgcaatacatcaagcagtaaaccatcggcaactaccttcatattggttttaatcagcgagcgataacacacttcgattgggtgtttaatttgcgctatatctgtaattaaatcttcagaatcagtacgctttttcttaattttagcgcctaaatgcgtcaccgtttcggcaatttgattcttgagttttttaagtaccgcacgatatggttcaaagtcttggcctgcaagttcaataagctcatcacttgcatctgacattgataactcattgcttagcgtttcgatatcacgcgaatacaaatcaagcgccatccagcggccatgatcaagtacttgctgtgtcacttcagcagttacaaacgggttaccatcacggtctccgcccatccaagaagtgaactcaattgggctgtaatcaatcggcaactctaaatcgagctcagtttttacatcttcgctaaattcacgtaagaaacgcggtacggcatgccataagctattttcgataacagcaaagccccattttgcttcgtcaattggcgttggccgtgaacggcgaatatcgtcagtatgccatgcttggctaattagctgagcaatacggtttaataagtcagcacgttcgctaggtaaattgtctttacgctctaaagatgcaagacaatcactaagttcaacgtgtttattaatcatagtacgacgcgtcacctctgttgggtgtgcggttagtacaaggtttatgtggagttttgagagtgtttgtgccaagtgatttggatctacttgaccttgttttgccgctgttgctaacgcttttaatgtttgagtgagagggtttagttggcaaaagccaacatcattaaaacgcgatacggtatgaaattgttcagcaacattagcaagattcaaaaaatgattaaatgagcgtgcaaccggtaatagttcttcatctgtgagagcgtgtagtacatcgataagcgcttgtctgtcggcttcgttaccactacgtgacgatttagataaagcgcgaatttcttctaccttatctaaaatggcttgtccttgtgcatctttaatggtttgacccagcatttgtccaagcatactaacattaccgcgaagtgcagcatattgttcactcattctcatactcctttctttagctaagttgaaagtacttactgcgcagtatttaaccaagcacgaacgcagctaaatactgatcctttctattaatatcattgtcggcgctaatttaatagatcgaattttctaacaaactcgtaaaaaagaataaccaatctatcaacataaaagtgtaataaacacgcagtttgttttgatagaagggttagcgacacacacaattggtaaaatggacttaccaattaaactgtcaaaatacgcgtaaattaaggcattcttaatatcagtttggtcaaatttttaccgagcatttttatctactttagtttaggtaaattagattctgaaccgctgtcgcaatacttattgatgatagattgagctaaaaaagtttttaaatattttataacaggtcaaaaatgcaactctttattctgtgcggtgcaagcagtgaaatcgctaaagcctatttcacaacactaaaaaaacaaattagtcgtggtcatatcgtcaccatcagccgtaataaatttaatgctaattttgatgagacatcaaacaatgaaatcagccaccagcattttacaactgattactcagagcaaagcttaggtgaaattgctaaagaacttgccaacagccaatatgacttagcccaactgatgatatttaatggcctattacatgatccagataatgcgcctgaacgtaaacttgaacaaatatctgagcagcactttatcaatagcatgcatacaaacgccctactgccaattcgctgtgtggctttattctcaacgcttttaaagccgcaagtagcaacagtgatttgtgctctaagtgcgcgggttggcagcattagtgataataatctaggcggttggtatagctaccgtgcctcgaaagcagctttaaatatgttatttaaatctgctgcgatcgaacttagcaggcgttataaacaatgccactgcgtgttatttcacccgggtaccactgatactccgctatcaaagccgtttcaggcaaatgtacccgaaggaaagttatttacccctgagtttgtagccgagcagctgtattcattgataagtgatgctgattatttacaacaatcacccagcccagcctactttgactggcaaggaaaacccatagactggtaggacaattatgcatttaacaaagcaagccattgcagatttagaaagccgctaccgcgcccatttaattaatagtttgtcgggatttaaaagtgctaacctagtcggcacacaagatagtagcggccaaactaatttagccattgtgagttcagtatttcatcttggcgcacatccccctttagtgggtatgataattcgcccacattcagtgcctcgccacaccctagagaacttactagcgactaagcaatacacgattaaccatgtcaacaaagacatttacagcaaagcgcaccaaacatcggcacgctacgataaagacgagtctgaatttgatgcaacagggcttactactgaatacctaaatgactgtacagcgccttttgttaaagaaagtaagcttaaatatgcgcttgagctgaaagaacaccaccaccttgccatcaatggcacggaacttatcataggtgaaataactgatatctacttagatgaggcgtgtctgcaagaagacggctttgtcgatattgaagccattggcacagtggccgttagcgggcttgatagttaccatgtaactgatcgtttagcccgcttagcctatgctaaaaaatgaatcttagattatgaatggcttaggcgcatgagtaagcacgtcatagcctgactcggtgacaactatgtcatcttcaaggcgcacaccaccgtagcctggtatataaatgccaggctcaatggttatcacatttcctacttcaagcttgtagtctgtcagtgtgttgataaatggcacttcatgtaaaaataaccctaaaccatggccaagacctttacctgcgttctcgccaaagcccgcatcagcaattaccttgtttgatatggcatttaaatctaaacaattaacgcccggtttaaccatttcaagtgctgcattttgtgcatctagaacagtattataaatacgggtttgtttttctgatgcttcgccaataatgtaactgcgagtcatatctgagcgatagccatttacaacggcaccaaaatcaagcgttacaaagtcaccttgctttaacacctgatctgagggattaccatgtggcaaggcagaacgttcagcaaacagcataatggttgcaaacgacataccctctgatcctagcttttgcattctaaattcaagctctaaggcaaggtcacgctcggttacacccggtttaaaataaggcagcgtttgtgctaatgcttcatcagcgatggctgcggcagcctttatttgcgccacctcccagctatctttaacgcgtctgagcttttctattaagccgtttactgctgttaaagtatggccgcttagctcatctgccacaccttgccaaattgctactgtgacataacttgcatcaaatgcgacatggctgtttgggctaaggtgcctgttaatacaatgaccaagagtttcgttgtctctgtctcggcaaacaacttcaaatcctgttgtttctgcaattgcacgttggtggtatcggtaatcagtgatcaacacacacgcattttgagtaattaatgcataagcagcattaccgctaaaaccacttaagtaacgaatattttcatgaccaagtactaacatggcgctgtaaccttgttgttctagcaaggctttaaattcagcttgtctttttaagtaattaacttgcattgtcgctccttattttttgcgcatgctaacagttatagccacaaatacgaatattatgcgattagtcgcagtgagtttgcatcagctgtttactcaagccacaatgcacaaaaaaccaaggagtacacaatgacaacatatggtattggcacacaaacgccagagcaggcgcttgactctttgtcagatatgacaacagatttaacccctattcaaaacgacgaatttcatgcgcgtatcgcaaaagcacaagcatatatgcaagcaaacaatattgacgcaatttacttaaatgcaggtactaaccttgcctattttacgggtatgcgttggtacgcaagtgagcgtttagttggcgcaattttacctgctaaaggtgatgtgcaatacatagcaccattttttgaaatcggcagcttaaacgattttatggtgattgatggcccaattcgaggttggcaagaacacgaaaatccttaccaactgtgtgtagatatactttcagaaatgggcattagcaaaaacggcaccattggtattgatgaaagcgcacagtttttcatctacgacggcattaataaagctaatagcaattacaagattgttaacgcacagtgcgtaacggctcactgccgcatgcataaatcagccaatgaacttgccttaatgaaacgtgcaatggacatgactttagaagtacacaaagcaacagcaagtatgctttatgaaggcatcaccaccactgaggttgaagcctttattaaaaaagcccaccaaaaggtcggcgcaccgggtaactatttttgtattgtgttatttggtgttgcgtcgtctttcccgcatggcgttaaaaacccgcaaacccttaaaaaaggtgatgtagttctgattgatactggctgtaaagtacatgattacctctctgacattacccgtacttatgtatttggtgaagcaaccgatcgccaacgtatgttttggcagcacgagaaaaatgcccaacttgctgcttttgctgccgcaaaaaatggtgagccatgtggcaaagtagacgatgctgcaagacagtacctcgccgaaaatggcatgggtccagagtatcaaacaccaggctgtccacacagaacaggccatggcattggtttagatattcatgaatggccatacctagttggtggtaaccctaccccactcgcaccaggtatgtgttttagtaatgaacctatgattgtcgtacctgatgagtttggtattcgcttagaagatcacttttatatgacagacaaaggcccgcgctggtttaccgagccggctcatagcattgatgacccatttggtttagctaaataaaatttcaatcattatcaaaaggccagatttctggccttttttgtatctaaattattacaatctttaacagtgtgtttagttaagagacaacctatcagcttttatcatgttatgattttaagaatttaacttaaatacctaacataattacggagaataaatgggtttacgttttaaagttccacataccttgatacttctgcttagcatgatggtcgttgcacttattgctacatggttagtaccacaaggttttttcactaccacattaagtgaatctggccgcgaaatggtcgttgcaggcacctaccaaacggttgctgagcggcattacttaaccccatgggatttattacaagccatacctcgtgcttttgctgctgctcaagatgttattttctttgtgttaattgttggtggcgtattagctattgcacgtgctacaggcactgtcgatgccctcattggtaggcttttagagcgccacggtaaaaagccgcagcggttaatttttatggtggtgttttgctttgccttagcatcaagcagtattggtactgccggcgaatatattccttttgttattattcttgtagcgctttgtaaggcaatacgactagacgcaatgactgccgtaggtatgatagtagcaggttatggtattggttatggtgtttcggcatttaacccatttactgtattaatcgcacagcaaattgcaggtattcctgtttactctggcctgtggttacgtttagccatttttattccattcgtgctcattggttttcatcatgtttggcaatacaccaaaaaggtagctaacgacccatctaaatcaatgatgattggcgtgccttgcccactggaaaatcaatcagcaacaacttacccagcacttgccctgcgccataaacttattttaggcagctttattattacccttgcaattgcagtatggggcatcgctacaaagggctggtacttatacgaactaggcggtgtttttattgcttggggtgtagttgtcgccattctaggcaaactttctgctgacgaagctgcaaacaaatttatagaaggcgtatctgatcttgttaccaccgcagtgttaattggtgttgcacggggtattgcacttattttagaagacggccaaatcctgcatagccttgtacatggcatgtcgttaccgctttcttatgtatcagcagaaatatcagcaattggcatgctggttattcaaaccctgcttaatacctttattccttctggttcagggcaagcttatgtcaccatgccactaatggcgccactaggtgatttagtgggtgtaccaaggcaagtcgccgtgcttgcttatcaatttggtgatggcttttcaaatatgatcatccctaccaatgccgtacttatgggtattttaggcatggcaggtgtgccttacggccattggtttagattctgtttaccactgttgattaagctaatggtcgcagcatcggttgtattagttttagcagtaatgtttggctatggcttagatgtgcagcccacacttaattaagttagtcgattttaaaaaagcgccgtaggcgcttttttagtttatataaactaatttgtagcaacacatttttagatagaaatgagttgatgctgaaggacgactttgtgccaaaataataacattaggcgtaacttgtttttgccccaaaataagttaggttaaatgctctaactgctgctttgagcaatcaagaaacggtccaagccctacacattgaatgataagttaacgcatctttaataataggcttacaacaccgtttgctccttgttgtaaaacatgggtgtaaatctatgtggttttgacatcagaatggcccaattgtgcttgaacggtgcgaatatcggcgccactttgcaataggtgcgttgcaaatgaatggcgcaaggtatgaggcgtaataacctttgtaatattggtttgctttaatgcttttttaatcgcttttctaacacatgtagggtggaaatggtggcgacgtatctcgccagtttctgggtcatcacttaatttgtaggaaggaaataagtattgccacgctagtgatttattagctgagggatatttacgagttaaagcgttaggcatccacacacctgcgtatcgctcgttttataaatctaatcttaaatattcttcaacttgcaaaatttgatttctaagtaatgggatcaactccgttgcaagagtaactatacgatgcttgttgccttttccgttccaaatttgaatgcatttgtaatcaaaatcaatgtcctttactcgcaattgcaccgcttccatcacacgcaaaccacttccatacattaacccagtgattaagtaatatcgcttggaaagatgactcatcaattgctttacttcatcaggcgtcatcactacaggcagcttgggttgtcgattacttcgtgcaaaattcaagtttaaagaaagctcatttttgacaatatgtttatataaaaaagcgagcgcatttaaagctgcactttgtgttctaggtgacatattacgttttaatacaatatggtctaaaaacgctttgacttctgcatctcccattgagcttgggtgacgtttgttgtgaaagtgaataaattttgcgatccaacctaaataagcattaattgttcttaatgaatactgacgagtgagcatatagtctgcaatgtagtttaaataaggagagcgagttttcattttcattcctttgaaatgaagctgtatatatatacagttttagctcagtcgctcgtatagtcaagaaaacgacccaatcgctcgtttttatactgaggtaaaagcgagaactcctaaattttaataacactggtaattagttaacaagtttgttagaaataatctaataagaaaaacgagctacgctgtggtagaaaaacgcgcgattagctcgctataaacatgttatatgcctttggagacttgatgacacccgatcaaaacttattaattataaaatggcaatttgcagcaactattctaatggggcttgattatttcatatctgatagctttagagagaaagctaatgcatacgttaaaagttactttcaaggtatgcaaaaaagggttgatgctgatgttgctcaagcctttagtgagttcaagggaaaattgtttcatgtgtttatttctcttgcccaaatagcgattggtgtgggagtttttttacttagccgttacattgatgaaaattcaatatggctacttatagttgcaatactaattgctggtgttttcatcgttgccggatttaattttgctttcacaactgtttttgaccttttaacaaaattggggatagctgcgccatttagactacttacaacattcttagttggttcgcctaaaggtccaatagctgcaataggttttatttgtttattgacttcattctatttgaggtattcgtataatggcatataacaagttgctcaagttcgttcgtaaactcactgggacaattaacagttggcttggcgcttcgcgcaagtatagccaacagtcaattgccccttagcaaagcgttatacattatcaagaggtacctgctttgggtcaagtaagtgataaaattgaagacgggaaactattagttaagatttctaaagacacgattgattgggcatctataaatgcttttcgaagaatcggattcttacttttaatagtttcagtgatttttggtgcgtggtactgttatttaactgatttatcgaataaagcagcgtctgatttagaaatccgtacacaacaagaagctaacttatctaaaagcaatttgtataaggcttccatagattcacttgatttatgtctcaatgccgtagagaagtccactgatttaaaggattggtattgtgaacgtgcactacaggcctataaaaatcagctttctaaatcagaattagaaatggttaaggaacttatagataaaaaagcttatggcgctatgagggccgatttgctccacaaagaaagaagtatcaagtacaccgaattaatcaacagaaaacaaaccaaagagcatcaactgttggataagcttttaggttcgacatcaattgcaatctttttaactctaattatatctatctattgttttgttgcttacttattttataaaagaggcccaaatagaaataatgtataacaaggtcattaagtcggattcgtaacagtttgctcggttcctctttgtttcacaatatagcaaactgttactcacctcttatggcggcgttactgattaaatactctaacgtgtttttgtccaaaaatgagttaaaaccacaggcttcaactcactaataataaatatttagggctaacgacgtgtcttattagttttaggcaggctttaatatttaagttctgtatagcactttgattacatgccaaccaaagcgcgttttcactaaatgtggttctaagatttcgccactgaaagctactttgtcaaactgtggcaccatttgaccgcgtctgaattcacccaaatcgccgccttttttacccgacggacaggttgaatattttttagctaaagtctgaaacttagccccttttttaagttgcttgatgatgtcttcagcttgttctttatgtttaacaagaatgtgcagtgcgtgcgctgtatttgccatggaaaatctcaaaaataaaaacgcgtgtattttatcacggcaatcaacactgagccactgcggctatttatgtttacttgttgcctgcaaaaaccctgtcaccaaacaaaattgtgcaatgtaatacgttatcattattgcgatacttgcatgcactatttctaaataaaagcggttaaggccaagaatagagtctgatataacaaacactgccccacctaacactaaaaagccgttagatttatctgtcatccaagtaagacttgccattatggtgagaaccaacatatagaaaatcaccggaatgagcatgtcatttaagtttggatagaataagcaaaaaacaatgatggccaaaaatagataaaggagtacaacttctagtcgccaatttttaattggcaacatggtaataatataaaaagcgtgacttacaaagaatgctgctaaaccgctaataaacaactgcccactatcgatggcaagtagcacatcacctagtgtggaaaaaataagtgcaaacaataaagtaataaaagtgcgattttgtaactgactgcgtgcttttaataccatcacaatcaatataccgattggtaaggttttaaaaagcgctagtaaaggctgaggccatgctggttgtaagagcagtaaagcaatgtaaaccgtgcttaaaattagaaagagaatgttcatattcttattattgttatttgttcccaagaacgagaatagcaagctttactttaaatgtttataaaaaatgctgcttttgtctttcggtcagtaacttacattgtgtttgtttaccaagaaaccgataacgattacggccaagccaatcatacatacgatcgcgaatgccttttggcagtagcttgaaaacgttagccaaagagaatggaaaacctaattgtgttgcgataaataacacagcgtcactttgtttgtatagctggtttttatcaatgactaacattgaggaaagtggatctttaactttgtgagcctttaataaacgctcacctttatcgctttgcatggggcataacttaaaggttatttgcttatcaaagcgaacaataaaacgaacacaaaaatggcacagattgcactgaccatcaaacagtatgactgggcagtgagtttgcaaaattaaccgcttacttgcacaacttgtttaccggtaaagccaccagcaagttgtttatttaatgccgctgaaacagcctcggcggtaaagtctacggcatggatttgcggcaatttgatctcgccacgagctgcattatcgagtaataagttacccataaaactcagcttttgttgcgcacataagctatttgcaagccacgctccacctaacgatacaatgccaatatttggtgcgcgtctaaacataagttcttgttcaaacttaggtaactcatttaaacaggcaatacggccacaaaagcgcattagctcaacgttacgaatggtagtatcgccaccaatacaatcaagcaccgcatcaaagccttgcggacctaattcacggcgaattttatcttcaagttttgggtctttgtaatcaaacaccacatcagcacctaattgcttaagtaacttatgattgtgtttgctggcagtggtaaatacggttgcgccacgttgcttagcaaattgaatagcaaattggccaacgccacctgcccctgcgtcgataaacagtgaatccccttcgctcagctgcaacttatcaagggcaattaatgccgtcatacctgaacaaggtaaggttgcagcgtctgcaggtgatacgttatctggcacaaccgaaacagcatagtttggtactgttgtgtattcagataacacaccttggtcgccaaggctggcgtgccatacaacacgtgcgccaacacctgggaatacacctttacttgcctgaacaaccacgccaacagcatcatgacctaatacatgcgggtaatgccacttacaaaaaccttgttttgcaaagttggcatcaacatgatttaagcccacatattcaacttttatcaaaagctcattgccttcagggctcggtactggcaaagaaagctcagctaacgcaattgcgtcatttggctcaaccactgctagcgcgcgcattgttgacggaagatctgtagtttgttgaatatgcgacatttaatactctgggttaaaggttgtttagttcaaagctccaacgaccattaaacgcttgataagcacttactttggcctgcaatgaagcaattgttgaatcaacagcgttctcttgcgctattaaaacatcctgtctcgcatctaacaactctaagtaaggaatttgtccttcttgatacattgcttgagcttgaccaaatgctttattcgcataattaaaacgctgatcagcataatttaactgttgctgctgtttgactagtctttgcaaggtaagttcactatcgctaatcgcttttaatactttactttgatagtcactgtaagcggcttcacttaaaaactgctgtgcatcacgctgagctaataatgcaggatagctgagcaatgaccattcaacttttggtgttacttgccattgttgcacggtatcttctaagccattgctggataagctcaccacacctgcaaaccctgccagactaatatctggcagtaatgcttttgaggcggcaacacttagcgaataagcctgactaaactgatacaaagcactggtaatatctggtctgagtgccattgcttcacttgctttattaaatgacacgctaaattcgtggctgagtaattcaggctcttcaatcaatgttatgtcgcttgcaagtcggccggttagcaccgctagggttgctaagtcgcgatattgcaagtaactaagctcaggaataagcgcttgttgctgctttaactgcgcaagggtgcggttaagatcaagctcattcgcaaccccctcttctactcgcgctttgagcacatcaatactttgctcgagtgcctcgatttgcatctcaatgatagcttgcttttgcacattaccttggtagctgacatagcctttcaccacagctgaaaccacttcaacctgtaatgctcttaactgctcggcttggtttagtgcacccgcattagcagcatctactaacgcggtaatgcgaccaaacaaatcaagctgccaattaacattaacgccagcgtttgattggcgcgaaattgcgccatctaagctgctgcgttctgcgcctacacttaggctgccctgcggataataatccgcacgggctgcacctaaacgggcaatggctgcatcaagttgaagttgactggtttttaggtcgtgattcattgctaaagcatcagtcactaaattgtttaactgcgctgaatctaaacggcgccaccagttattttcgctcgcaccttcgttttgttcaccaatttgtgtatcgctaacaaattgtgtcaagctcacttgctgctcttgcatatcgacgctttgtgcgcagcctgccagtgctccggctaatagcatcgcactaactagtttgccgtgtttaaagagtgcatgaagaggcttatgcatcgttttgctccttctgcgattttttagtgactaacatataaaataccggggtgaacaataagccgaacacagttacaccaatcatgcctgagaacaccgcgttacccatggcatgacgcatctcagcaccagcacctgttgctaaaacaaggggtacaacgcctgccgtaaaggcaattgatgtcattaaaattgggcgaagtcgtaagcgacacgctttgatgatagcttcaaggtgagacatcccccctttgtgctgatctcgtgcaaactcaaccatcaagatggcgttcttacttgccaatgcaaccagtacgattaatgcgatttgcgtgaagatattgttgtcatcaccgacaaaccacacacctaacaaggccgagaaaatcgtcataggcacaatcaaaataatagccagtggtaatcttaagctctcgtattgcgccgcaagtaccatgaacacaagcaatacaactagtgggaaaacatacaccatggtattacccgctaatatttgctgatacgttacttctgtccactcaaactcaataccatttggtaatgtctcagcaaggattgcttcaatcgcatgttgcgcttggtcagagctataacctggtgctgggctaccatttaattcagctgtaggataaccgttatagtgcattacacgatctgggcctgttgttggtgtgaccgttaacacagagcctaatggcaccatctcacccatgcggttacgcactttaagattcaaaatttgctcaggatcttggcggtagtcagcatcagcttgtgcattaacctgataagtacgaccaaacaagttaaagtcattcacgtacatcgaacctaagtacacttgtaaggcattgaatacttcatcaagtggaataccttggataagcgcttgctcacggtcaatatcgatatccatttgtggaacttgaattctaaagcttgagtagaggcccattaatgcagggtcttgctgcgctttagcaatggttgcttgtaagctattaaagagtgcttcaaagcctttattagcacggtcttcaatttgtagtttaaagccacccgttgtacctaaaccttgaattggcggtggcgggaataccgcaacaaacgcttcatcaatactggcaaacttttgatttaactgagccgcaattgccattgccgacatactcggatcttgacgctcttcaaaaggggcaagcggagtaaacacaatgccgctgttagggctatttgtgaaaccattcaccgatagaccaggaaacgatactgtgtttgcaacacccggtacttgtaatgcaattttttccatttcttgcacaacttcttgggttctatctaagcttgccgcatcaggtaactgtgcaacagcaactaagtattgcttgtcttgctgtggaataaaaccacccggaacagcatcaaacaatttaactgtgccacccacaagtgcaacatatgcgactaatacaatcacactcatacgaatcagtttttgcaccagcttttcgtagccattggcgcctttatcaaacaagcggttaaaaggtttaaacagccaattaccgaatacgcggtttaataacttagttaaacggtctggttttgcatcatgtccttttaataataacgccgataacgcaggcgataatgttaacgagttaaacgctgaaataaccgttgaaatagtaatggttaacgcaaattgcttataaaactgaccagataaccccgtaatgaacgccgttggaataaataccgcacaaagtacaagtgcaatagcgataattggccctgttacttctgtcattgcaacacgggttgcttcgagtggtgataagccttgctcgatattacgttcaacgttttcaaccacaacgatggcgtcatcaacaacaataccaatggcaagaaccaaaccgaatagcgataaggtattaatcgatacacctaaccattgcataaccgcaaacgtaccaattaaagaaaccgggaccgcaatcagtgggataaccgatgcacgccatgtttgtaaaaacaccacaacaacgattaccactaacgcaattgcttcaagtagcgttttaataacagcatcaatagagccgcgtacgaaaattgttgggtcataaacaatgtcgtattcaacacctgccggaaagtcttttgataatactttcatggtttcacgcacttgatcagaaagctcaatcgcattagaacccgggcgttggaatactggcattgccaaggctggttgaccatctaacattgctcttagtgcataggtgtcttggcctaactcaaggcgtgctacatcacttaggcgtgtaagctgaccttgctcacctactttgatgatcacattttcaaattcttcttgtgagcttaagcgcccttttacgttcatcagaatttgaaactgattacttttcgaggtaggttgtgcacctaagctacccgcagcaatttgttggttttgcgcgcgtaacgcgttaacaacatccattgccgttaaatcgcgtgcagagagtgcatcagggtttagccaaacgcgcatcgagtactgcccaccaccaaacatacgaacatcacccacaccaggaagacgtgcaatttggtctttgatatataagtcagcatagttcgctaagtaggtcgtatcgtgcgttttttcaggcgaatataaatgaaccaccatggttaaatctggtgatgatttttccgctacaacacctaaacgctgaacttcttgtggtaagcgtggtagcgcactgtttacacggttttgcacttggacttgtgcacggtctaaatcagtgcctaacgcaaacgttaccgttaacgtcatgcggccatcactggttgcttgcgaaaacatatacaacatgttttcagtaccattgatttcttgctcaagtggcgtcgccactgtttcagcaatcaccgttgggtttgcacctgggtaacttgctgtcacaacaaccgttggcggcactacctctgggtactcactcactggcaattgaaataacgagattgcccctgcaatgagaaagataagcgacagcatcgctgcaaagatgggtcgctgaataaaaaagtgtgaaaatttcattttgccctacttcttcgcgactagatcagattgattatttgaaagagtgaatgcaattccgtcgctatttatagtgactgtgtttggtgaaataggcataccagggcctacacgcgcagggccatttacggctatcacatcgttttcgtttaagcccgatgtaatcgctcgtaggctgccgtaacgctcaccaactgtcactaatttatattcaagaacattgccttcacccacagtgagtacaaaacggtttttcaaatctgtcccaattgcacgctctggcacgattactttttcgcttactttattggctgcaagcttaatacgagcaaatgaacctgctcgcagttgttgctcatcgttttcgaacacggcacgaacacgaagagtaccggtagtttcgttaatttgattatcaatgaagttgattttgccattaaagttaaagctggtttcacccactttttgcatcacaaccgcttgttcgctttgcgcagtcacatcagcgaatgactgattccacgtgcgctcatcaatatcaaaataagcatacatttgctggtttgacacaatgcttgttaacacgctttgaccggcaagtacgttgttacctttggtgatattagcgcgcgatacaacgccatcgattggcgaacgcacttgggtaaaagctaaatcaagctcagcggcagtaagctcagcttgtagagctagcaattgcgcttcgcgttgtcttagcgttgatttacgagattcagcttgctcagtagaaatcgctttacgttcagttaagcgctctgctcgttttgcttcactttttgcttgctcaagtgccgcctttgcgctctcgatttgcgcttttaagctatcaaccacggcagcaaaaggacgagcatcaagggtgaaaagcaaatcgccttctttaacgctgtcaccttctttaaagttaattttatcaatcacacccgaaacacgcggcataagggcaacttcttggggtgcttctaaacgcgttgtataggtgtgccaattttgtactggcttaacaagtacttgtgctacatcgataggttgtaaatgctgttgctgcgctgcttggttggcttctgtgccacaccctgcaagcgttaagctcgcaatggtcgctgccactgcaagaatagatttgttcatcacgactctcctgttaatagattggagacaatgttacggaactaattagaggataaaaatgatagatttttaaattcattaatgccagaatggcaccaataaagtttaaggaactgctatggataccaccagccgcttattaatgttacttgaagtgattgaacgaggctcatttgctaaagccgcagagtctagaaatatagaccgttcagtcatatcaaaacaaattagccgtcttgaagatgaattaggggtacgtttacttaatcgaactacgcgttccttttcgttaactgccgctggcgctgaaatggtaaaaaaagcagctgaactcagagatttgttatcagataccgtaagacttgcagagaattaccaccaagaaccccgaggtacgttaaaaattacctcatcaagtattattggcaaacgatatattcagccagtcattaatgactttcaaaaacgctttccgcaagtagaagtagagcttcgcttagacgacaggctgattgatttagtgtcagagggttatgatttagcttttcgcgttggcgagccaaaagactcatcatttattgcccgaaaaattgcccgcaaccgcatgttactgctggcctcacctgagtttatcgaaacttacggtatgccaaagcatgttgaagatttaaaagagctacctgccgctagctattcaagcccaagtaaacgtattagtggtattcgctatcgtaatgtcgatggcgatattattgagcaaaacattaaaagtgtctttcgtgcaaacgatgctgaagtacttttgatgaaagctatttcaggcaatgcttatgttcttgccccggcatttattcttgatgatgaagtaaaacgcggcgatttagtgcccattttaaccgatatggaattactcgattacagcgccgtgtacgcggtttacccacacagagacttaccagtaagaacacgtttattttttgatgctatgcgcgagtacataggcaaagatattccaatatgggaagcgaacattcctgattttgacactatgtacaagggttaagtctatatagcgctagctcgctttattacaccgggttaattgttggtttaactcataagccgttacgactctatttcggccttgctgtttagcttgataaagtgcatcgtcagctcgttttataaagctttttagggtttggtttggtgtatagcaagcaacaccgatactcgcagtgaggttgatcgcttgctcgtcaatattgtgaattgtcgatgctagctgctctcttaattcttgtgcaaaatctaatgcaccttgagggtcgctgtttggtaaaaaaatagcaaactcttcaccaccaatacgaaacacatatcctttagtaatcctttgtctgaaaaacctagtcacctcaattaaaacgcgatctcccatttcgtggccatagtgatcattaatttttttaaaataatcaaggtctaacataaggataaacaaaccatgtttatttgtttgttcaatttcaaaatagtgtgtcattgctaagcgattaccagcccccgttaacgggtcaagtaaagctaagttttcgagccgctgtccatactctgcacgactgttttcaaaggtatgagacaccgcccaaatactgatgtaggtgaaagaaaaattaagtaagaaattaatagtattaaggggttctaaactaggtttagctaatagaatcgcggcttgagtgaccgcggctattaatgaaaggtacaaaccaacttgtttacctaatagcaagtaaaacaaaataggtaatgaacaggtccaaataaacaacacgctttttatgttacttaaatacgtgccgagcgtgattaaaaccgttaaaaaaatacataatgtaacggattgccagcgatgaccattgtgatttcgtgtataaaagaaaatataaaaacagaacagggcgaagataacttcaagtgcccctaataaaatcatgtttgtaacaagtaaattaaaaacggcaaagatactagcaagcacacccaagcaaaatcccatccatttcagaacgttatttcgtaaagcctgagtacctctcagtgcgccgatatccattagatttcctgccgtaattatagtaagcagattttaacgtgattcaccataattaggaacattttattaccaaacagtgcataacaatgcacttttttacctacaattgttaaacattttagctccaaagcaataagggaaatacaccccaaagtgctaaaatgagtgaccattgcaaagcagctaccattgctaaactatttaacaaattcattttactcaacttttcatgagcaaatatacgccataacccgtaagccatagcaaacggtaatattgtcgtggctaatgctaacaatgcactggcaagtgtaaactcaccaatatttaaaaatgattgagttaaaaataaaggcagcggtacaaaaagaaatagcgtcgccgtaaaaggcaataatagagctgacgacaagcgtaattgccccttaaccaagcaaatagcgccatatactaatatccataatatggcgattacgccgaagacgaggctgagccacatcggcagcaacttccaaagactggtttgttcatatgttcgaaaaccatcactgatcatatgttgaccattttcagaaatatacagagtgtgtgaaggaaatcgctttgttttttcacgaaacaaattatcgcctatagctagcaaggttttttgctgagactgaaatggtgacagtgttagcgtttcgccatttgagctcactgttgcaaaatgaagtaggcgatcaaaataggcaaatcttttcattctgtttggggaaagcgtgtaaaacccttgccaatcatcaagcgctacttgcgcttttgatagggctattgcatcggccttatttacaccaaggttgctaatcagcatgctatcaaattgtttgtaatttgcagtttctacatcggcattaaaagcgataaaaaatgcttttttttgctcaggaaaaaaacaaaagttagtgcgataacctaaagtagagccactgtggcatttgccaaccacattatgccggtcacgtgtagttacccctagcgcatagccgatatcagttaaattatttaaggcagcttctgttttaaaaggctttcccatgcttgttaataatgtcggttcaataaatatacggtcattaatcttgccatcgcccattaaaaactgcgcaaacaaagccatatcataagctgtcgttgtgaactgccctgccggtcttaaaaacattggtaacgtggcttggctaacgccattttcaaaatggcccatagcaagcgcaggatcgctaaactgcccgacttgagaaacaaaattaaatgtactcatgtgcatacccagcggttcaagcaagtgtttatctaagtaagattcatagcgctctttaacaacggcttcaatcaccatagctaaaattgcataaccaagattagaataggataagcggcttccggggcgatttctaatacgcaactgactttcagtaaaggtttcttttagagccgtatcaggctttgcttgtgtcgttaataattgccaaagccgaatgtcttcaagccctgacgtatgatcaagtaaatgtctaacccgaactggtgtgttcaaggcccaaggattttgcaagccaatatctggtaatatttcagtaaccggggtatccaaggagagttttttatctgttacaagatgcaacaccccagtagcaataagtgttttaacgatagagcctgtttgcaccttattagctgtcgtcataggttttaaattcgtaaagtctgcatagccttttgcaccttgcgcaattttatttgcactcactgttgaccaaacaacgcctattagagattcgttatgcaaagagtgttcaatttgattacttaactctatttctgacccaaacttttcgttagccaaggttacatgagatacaaaaaataatgccgttacagcaataactaaaaattttacaaggtgtttcatgttttattaaaccattccttaggcaacaagaagttgacctgcggcgtatttactaaccgcaagctagaaagttatttattaaaattacgactatgagcgaggcgtgattatttagtcattcattaaatctgtaacatcatcgattagatcatcaagctcttcacgaacatttcgacgctgtttgtctgtaagagtgggttttaaggcaagcagtaaggttacgtagtcatctagatttttatcgtcagctttgattaattcatcactcataaaagccaaacgattattaatgatcaccgctaactgttgatcaaaatccgcaggcttagttttttgcataaacaaagattttaaagcatctaagcgcttttgtttgtactgcatccaaagtaaaaatgtactaatgcgagtgttagatgccgattcgatcagtgctttttgttcagctgataactttgagccaaaccactctttataattctcaagattttcatctagacgttcttgtttgtgctgctcagcagatttttcttgatgctctaaatattcttcattgattttatcttgcagtgccgctacaaattcaactcgttgttcataactcaatgcgtttgctaaatcgatcaattctggttctagcttatcaactagtgtttgccaatgttgctttgcttggctgaaatgctgttttaattgagcgtgattaacgtcagtttctaacattagttttaaactttctaagtcctgtttataaagaggcagttgagtctctcgatgccaatcacggctggttttaactatatgttcaaacttttcagcttgctcattgtttaagtcaacataatcatcaatccagaatcctgacagccaacctaaattgttataagtgaagctaggagaacaaccagcaactcctaaaagtaaactcaatgtgattaaacactttgctatttttttcatcatgctcaatttattaatctaattttaattagtaccttattaagttaacactgagaataaataatcagcaacaccctctaaatgaaattaattatcatttaagtattgacgcccacgttaatctaagtaataatcgttatcaacaagttcaggtaggctattaatctcacaacaatatcaatgtctataaggctttgatggtgtttttctggatttgttcaagatttaacacttgattgtttgcagcttcctcgacccaagcagcgacataaaacgttacactttacttgctacattgctcatatcggtgacggtagatatgacactaaaaagcccatcatgggctttttttatttctttaatttttctgtaaaatctgtatcttgtgtctacttttttaattatgtacttgctattgccttcaaattgggcatttaatactgttgggtctaaactaaaaataatgttttgcccttttgcgagtttggcaatgcatttatcaatatctaagtttgtagctgttgataactaacacacatttggaggcagacaatgatcaagcctaacttgaaatcactattgcttactagcgcattaatcctctcaccttttgtacatgctagcctagaagatgctcaattggcggctaatgaaggtcgctttgaagaagcattaaaagaatacaactatttagcagatcggggctttgcgccggcaatgtatgaacttgctaaaatgtacgaaggtggttttggtgtacagcgtaactaccaaaaagcagctgagctttatcaacaagcagtaaaaaaagttcacgctgattcgatgtttgcacttggagttctttaccaagaaggcaaaggtgtaaaactcgacaaagaaaaagctatttcgctgtttgagatggcagccaagaagaatcaccccgcagctcaatataacctaggtgttatgtatgcaaatggtgaaggtgtattacaagattaccgcactgcacttagctggtatcaaaaggcggcagcgaataatttcacacttgcccagtttaatatggctttgatgtactatgaaggccttggcgttccaaaaaacctagagaaatcttatatttggaataccattgctgaatacaacggcaacatggatgcaagccatagccgcaagcttgatgaacgcagtatgttacctgcagaaattgaagccgcaaaagaaaaagctgatgcaatttacgcaaaaattcaggcaggtttatatgcccctgatggccgcttataagtgtaactacttgcttaattcagtgataactagttagctaaaaatgagcattaaatgttttgtacttgcgcctaagggcgcaagtacatccattttaatatcttaataagccacttattctgctttaataacaagtgtgtgcgtgggttgaatttacccgaaaccaaagtattgcgcgcatgactgaaagttttaaacccttcaataccgtggtaattacccattccagactcaccaattccgccaaacggtaattgatcagctgtcacctgcataagtaaatcattaattgctaaagttccactgcgaatagattgactgactcttttgatttgttctttattatggccaaaaatatacagggctaaaggttgagagcggtgattgatgtaatctatgacttgctgctctgtttcgtaggtcataattggtaacagagggccaaaaatttcatccttcataacttgcatatcgtcattcacttgtgtgattaaatgcaagcccatacgatgttttaagtcatcatgttgatcatcatcaagtgggctaaacagttgcgcccccttttgctctgcatcgtgtaggtatgactttaaacgttgatactgagcatctgatattattgaagttaagtttttgccctcaacaccttgtttataaacttttttatacagttcacacagctgcaataccaactggtgctcaagctttttaggtacaaatacatagtctggggcaacacatatttggcctgaattgttgagctttccaaataacagtgtttttgccgccatcttaatatttacgtcatcgagaataacaacgggtgattttccgccaagctctaaagtaacaggtgtcaaatgcttacttgctgcttgcatgactttacgaccaacagaagttgaacctgtaaataacaaatgagcaaaagggatatcacaaaaatttgcggcgacttgggcatctccttcaacaacaacgcagtgctgtgctaactcatcagtcattattgatttgattacctggttagtgtggggtgtaaactcactaacctttaacattacccgattacctgctgctaaggcacttatcacaggtactaaagataattgaataggataattccacggtgctattacccctacgacaccttttggctggtactgaatatgtgcatttgaaggccataaactaataccaactgcacgcttttcgttacgtgaccatttaggtaaacgtttaattatgtcgctaattgttttaaccgttggtaataaatcaccaagtacggtatcaaaggaagtacgataaccaaaatctttactcgttgcagcgaccaatgcttgttcattttcaataagccgagttttaatttgttttaacagcttaatacgactggcgataggtaaataaggctgggctaaaaatgcctcatcaagttgtttaaattgtatttgcaaaggtacatctgtgtcagtcaaaacgtcatctctttcaaagcgattttatcaactataaccagcaatgcatgtatgggcaacattagtcgtatcaaaaaaaacagcgctcactaggagcgctgtcggtggttggaaaatggttgagaaaataatctagttattaaaaaccaaatactgctcctgcaattgtcattgtgacaagagtgatcataacaatcgcaataatattcagcgcaaaaccagaacggatcatatcgcgcatttgaatttgcccagagccaaaaacaatcgcattaggcggtgtcgcaactggcatcataaacgcacaactacacgcaatcgctgccggaataacccacacaagcggcgtaccaaatacagattcagctaccgggcctaatagtggtaagaaacctgctgctgtggctgtgttactagtgatctcagttaagaaggtaattaaggtagccactgctagtacacttaaaaccaatggaattgcacttgccccttcaatcatatgggcaatgtattccgcaaggcctgatgatttgatttgtgcagccagtgttaaaccaccaccgaataaaagtaacacaccccatggcactctagctgcgctttcccagtcaagaatacgctcaccatcacctttgtttgctggtaacacaaataataataaggctgctgcgattgctataccggtgtcagaaatttttaagccagaaagatcagccagtaacggtctgaagatccaacaaacagctgctaaaacaaatactattgctacacctttttctgcacgctgcattgcaccaagctcttgtaactgggataaaaatagcgatttagtatctttactcgctgcttttgcacattgtgtatctactttataagcaaatttagttaaccaaatccagcataaaataagcataacagtcgcaagtggtacacctactttcatccattcggcaaagccaatatcaatcttatagctatctgataagtatgctgccataagtgcattaggtggcgtaccaattagcgttgcaataccaccgatacttgcgccataagcgattgataataacaatgctttaccaaattggtcattgtcagggttagactgtttaaccaacatagtaatcgacatagcaataggtagcatcattacagctgttgcagtatttgacatccacattgataagaatgctgttactaacatcatggctaaaatttgcaggctaggtttagttccggcatgaagcatagtgttaagtgcaatacgcttgtgtaaaccccaacgctccatcgcgattgagatcaaaaagccgcctaagaataaaaagatcaaagggtgtgcatacggtgatgcgacccctttgattgctgcaatatcagcaagaggtgatattacaagtggcaataatgaagtcgcaggaattggcacaacttcactgacccaccaagaagccatccaaaatgctaggcctgcggtacgaagtgcagctacactcatacctgcaggaggctcaataatacaggttaataacatcactaatgggcccagaagtaacattactgtgctcattaatggacgtggctgtgagccatcttttgtttgatttactaatgacataccgactccttagaacttgtatttaaggccaattgcaacgctgttgtctgattcaagttctaaatctaaatcagtatagaataagtatgctgtggtttgtttatcaaaattatagtcaacacccgctgtccattgtttaccttcttcagcatggcgaatttttgagtcatctttaacgtattgcagtttaggtacccatttatcaattgcatagcttgcactgagtgcatagccattgccttctttcgtgccatctgttgactcgctgcgctgaaacaaacccgcaagctggaggttttcaagtttccatgctgcaaccacacggcttgccgtcaatttgttaagtgcatcgacatggctaatagcaacatagtagtcttttgattttaatgcacggtcaccataaataaccgttgccgcaaaaccatcttcatcattactactgtcatcttttggtgcataagtcagcgcaagtgatgcgccaccgtatgtttttgagctataggtaatggtatcgccgatacggtcttgacctgggatcagctgagcgatatctgcttgtgtttcgttaaagccgtctagtttaccttcagagtatttaaaacgagtgtcgttacgacccacaacgacctcaccaaaatctccagcaagccctaaataagtattacgcgctgaaaatggctcgtttgtgtcatcgtgctcaaagccttttacttgtacttcatatttaaataccgctttaagcgattctgttagtttgtggctgcctttaataccaattcgcgaaaaaggtgcctcaatttgtgtaccttcgtcagcatagcgcataacgccggtatctgtgtttgctatttgaacttctgctttaccgtatactgcgtactctgctgccattgctgagcctgttgtgctcgctaaaattacagccgctgctacgcgtgtttttgtatgagtgaatattgttgtcattatgcgccccttattaggttcaaattgttgttcctaacaagtaaggcaagttggttgccaacttagttaattttataaaaactaataaataacaatacgttagatttatttatctatataagactggcttttatgggtggatatccacacatttttaaaaacatgctgtcaccagttccacccattgtgaagagtttaatctgagagggttgtttagtctttgaacatttcgcgattaataccgtatttggtcatcttgtcgtagagagttttacgcgcaatttgtaatgtgaccatggtgtctttgatgctaccgttgttacgctcaagggcttcttcaatgagtgattgctcataaaaactaattttttcagctaggcttaagtcctgagcaagttcgttgtcattgtttgattcgctgtatgaggcaaaggctaaatcagagcccagcaatacagcacgctcggcttgatttctaagctctcgcacattgcctggccaatcataagcaaggagtcgttgtttagcctcactactcagcggtgccggtggtttatgaaaacgtgtagccgctattgagctaaaatgtttaaaaagtaatggaatatcggcttttctgtcgcgcaatgccggaatactcacttttactaaatttaggcggtaatagagatcggctctaaactcccctgcttcgaccagtgtcattaagtctacttttgtggccgcaactatgcgcacgtctaaatcaatggcgtggttatcacctacaggcgttacttttcgctcttcaagcactctcaataacttgacttgtaagcttgcaggtgttgactctatttcatctaaaaacacagtgccgcctttagcaaattcaaacttaccttggcgagattgcgttgcaccagtgtacgcgccactggctgcaccaaaaagttcactctcaatgagttgctcagggatagcgccgcagtttatggcaacaaaattagccccagaacgattactttgatcatgcaggtaacgggcaactaactctttacctgtgcctgtttcaccttctattaaaacatcggcaggagtgtcgattaccgcattgagtaaatgcatcatttgttgcatttgctctgtttcacctaaaatacgcacaccgggcgcagaggttttctctactgctatttttaacgcgcggttttccatcactagagcacgcttttctgaagcccgagcgatacaatctaacaactgctctgttagaggcttttcaaataaatcataagcgccaagctgcatagctttcacggcaacagatacatcagcaaagccggtaagaaaaataaccggtaactcgctatcgaaggctttaacttgttctaaaaatgccaagccatccatttttggcatgtttatgtcgcttaatacaatcccctcaaaacgacgactcaattttgaaagcgccgcggttggttcactaaaacactgaacttgataaccttcaatctcaaggagttgctttaatgaatcgcggatcaccgcttcgtcatcaataacgattacctgattacaggtcgctgcaactacactcatgatggttccttatttgtttgtaaggttattataaattgtgcgccgccttcagggcggttgtgcgcagataatcgaccgttaaatgagtcgataatttgtcgtgaaatcgataagcccaaacccaaaccattgctggttttagtactgtaaaatggctcaaagatgttacctaacgcgtgttgatcaatacccgggcccgtatcaagaatagagagttttacgcggtcatcgaaaagttcgagctcaaaacttaattcgcgtttttcagattcactcattgcttgactggcattagtgatcacatttaccaatacttgttcaaacttaacgctgtcaacccacacggttatgtgtgcgtcaatatcagcggctttcacttcgatatcgtcttgctttagttgtgcactggcaatcattaaggcattttttaacatacttgcgaggctttgctgcctaagttgagtttgcgccggtttactaaaatgcttaagttgcgcgacaatcttatggacacgttctatgagtgactgaaccagcactaaattttcactggcttgctcaatattgcctttaataagtaaccgttttgcactcactaaatatgtattcatggcacttagtggctgattgatttcatgattaatgcccgcacttaattgacctatcgttgcaagtttagctgtttggatcagcgctttttgggctttttcgagcgcttgagttcgctcgatcacttcttgctcaaggctgtgccttgaaaacagaagctttttatagccagcaaaacgcaccatagccatatgaattaataccactgcaatggcataaaacacacaaaaccagaggagccttgggatttgcgcaagctcaacattcgtcacatccaccagcacattagctttagcgtttataatatctattgtttctgtcgcactgataaagcgcgcttctttgccatcaagttgaatactttgctgagcggttttttcacttaatggcttgttggtgtacatgagcaaacttggtttatgtgataagtatcggcgtgacttaaccaaagcggccatttgttcatcacttagtgtattaagtgactttaaacgccaatcggcgacatccgacatcacaatcacgctatcttctagcgcgatataaaaatgggtgctgtctgatgcattaagaagctggcggtcttgttcaaactttttagcatttacttttaacgtgacaacggcaatcactttgcccttctctataacgggctctgaaaagtaaatgccccgctcactggaacgcatacctaaagcaaaataagcaactttttcaccttgcttggctaaataaaaatatggccgaaatgcaaaattactgcccaaaaaggtgtaatcaacttgccagttactacttgccacgaccgagcctgttaaatccattaaataaacatcagatgcaccgctggctcgttgaatatcttcgaggtaatagttaacagcctgttcgccagtacctttattaaccaaaaaggatttaaccaaatcattggcgctaactaaggtaggaatagttttaaagcgggctaactcgcttgaaaaataatgacttaactgattagcttgaacacgactttgttgctctgcttgttgataatcgtgagcgcgtccaaggtaaaaaactaacacaagcaacaataaaagcattgcacctgcaaaaactaactttttacttaatgacgacattcaaacctttgagataagcgcaactagaaattgaactggtagtgtaacgataaatcttcagttgtaccagcaactgcgccattgtccatgcgtggatcaaacacgttatattgtttgcctagcaggttttctgccttaagcattagctggcttttggcatttagctgccactttaagctaccgcctagcaaagtataggctgactgtttaaaataggcaccactcaccgagctcacctcaactttgtctcgccataatacatttaaacttagttgccaactgtcagataagttataactagttactaagcttgcaaagcgcttgaaacttgcattaattgggtcttcaaagtattgagtataggtgcctgttacagagaactctttatttgattgccaagtaccatcaagttcaataccactgttttggctattaaaggagtttgcaaaggtaaataaggcatcattagattgtgtaggttcaatgtttataaagtcgtttaattcattataaaaaagcactgcattagcttgtatctcagatgtttgaaaatgccaaaccagctcagtagtttttactgactcagagcgaagtgccgggttgcctactgtgacatcatcatttgaaaaaagctcgttagtaacaggtgttctgaatgactcgccatattgtaacttaacggtatgctctgggtttatgacatatacaccagcaagacgaggcgaaagtttgctgtcgatgttgttcacatcgtcatagcgtgctccaacatataaagtaaatgcttttgtgtaagggatttttagttgcccatacgcactatatgtttcaaaggtgtatttgagggccgcaaactcaggaaaatccataacagtaacaataccttgctgataatagctaggatctataattatcagacctgattggtcgtcgtaataactggtgcgaactccagcttcaacttgtttagcctctgagtactctactcctgcagcaagctgccattgattattaaattgataactcaactcagtttcaaacttactatctgtagtttgccaagctgggccaactaaaaagtcaggcatatcatcaaatgcaacgattaaaccggcgctagaaatattatgctcagtgtatgaataacttgagtcaagctttagcttatcgttattaacccagttatatttaatgccaacaaaggtgttatcactagtatgttggttttgctttgagtagcctgcaaggtttaaaaactcatcgagttctgttttgttgtaacgagcacttagtttgagctttttgtaatcgacacccgcttcgagataaattgcttcaagtggatctttaaccccttgcgggtagctttcaccgtctttttgatcataagaaaatgtcgcatacacagcggtactgtcattaacagtgcggttaaactgccctgttgccccatagcgaccattattgccaaccacgagttgcatagcatttcgctctttagaggtaacaatattcatcacccctaaaaacgcattactaccataaatcgctgagcctggaccgcggataaactctattttttcgatgacttcaataggaatataaggcatgtaaacagaggctttgccaaatgatgactcattaactcgctcaccattgatcatcactaatacattaccgctatcaagataaacgccccgagcatggtctttaggcacggcgccaacccagtctccacgagttgattgcatacctggtacgaagttcattatctcatacgcattatcgataccaagtgcttgaatttgcttgcggttaaacaccgtcatagtagaaggaactgacgacaaagtctcagtagttttagttgccagatcaacatgtacctcaagcaagtcctcaaaacttaaagaaaataagtcttgttcttcagctgaatgagcaaccgaagagatggttgaagcaactacaattgaaaaaagtgctgaacatcttaatagcttcacgctgcgagatacctgtactaatagcccatgctgcaaaagcaacacactgtttacactattaatacaaaagattggcaagcttgcaatgtttttataattttagttgaagagttctcggaagtagatacaaaaaaacccattttaaactaaaaatgggttttaatatgaagcttaattaagctgtttcaatattacctgtacgctttgctttgatgtacttatataaaccaataagtgacgctgctatccagaaaatttcgataacaaaactagcaaggttaaagttataacaaagactaatcagcaacagaattgcccctgttaagttcatcatgttatacacaaggccggttggcgatgctttattcagttgtaataaaaagaaagcaccaaccactaagaatgtgcctgtcatgccaataatatcaaataaaagtgctatcacgtgcgtgaatccattttgttcatgtgtttatacccatacaactggcccaatccatggggagggttgttttcattcattgaaacagcaaaccggtcaatagtatcagagcatgaggaataaacgaggataaatgtccgtattttaaaacctatttatgcgtcaccttaccaccgatgatttttagagcaggtgcgccacggatcatggtctcgcgggcaaattgacgttggcagtcagggcaaatacctgtttcattggtaaagtcttggctaatacgctcaacaaagcatttaaccaaggccccttttccacctttgcggtatttaaataattggcttttacattgtgagcaaaaaatatcgactgttttagttggaccttttttatttggtttagccattaactacccgattttacttctaaaaggctgatcctaccatgttaagaccacagtcccaaaacaagaccaataagtgaaaactgtaatatagagtaacttgcattcaccaaaaaaagctttaatgggcgctgctcaaaaatataaccaatccccaaggcacagctaacccaacataaaccaataataaagccagtacctactgccactcctacattgacgtgcgagccaatgaataaggataaactaaaggcgattatgcagcataaaataaaactaccaccaaagactttaattggattgatactttgtaaatcaagctctgttaaaccacagctttccatccaaattcgcttaaatagccaaggtgagtaccacagcgcgcctagaagaaatgaggcaaggccagcaaaaaaaatagcaaaaaaattaagttctgaaaaatgcatattgcaaactcatacaacgaacagtactaatttgactgtagttaaggatctgcgatgcagcaaaccaaaaagacttagatttatacctgtctatatcaaaataatactttaggatgtcactcaacacgcgttcccaccaaggaaacagcttatttattgttgaactggttttttttgtaatttgcgctgcaaagttcgcctgtgcatattgagttgtcgtgctgtttcggaaatattgccattattactatggagtacatgttgaatatgctcccattctaatcgctctggcgacataacttggctcggctttgtatcttctaatgatgggtttgcttcagcgtcacccaatattgtttttaataatgaattaaaatcaacaggttttggtaggtagtcgtcagcacctaaacgaattgcttcaacagcactagcaatacttgcaaaaccggttaatagcacaatgcgagcagttggaaactgtgttcttatcggtttaattaaggttaagccattgtcgtcaccgagttttagatcaaccaaatagtggctcgcatcaacagcgtttagtttttgcattgcttgctctttattatgggcaagctcacatgcaaagccatgttttgtaaaacgccttgccagtgtggtggcaaggtttacatcatcttcgattattaacagtttcatacgatcttaagacttacggtggcaattgcaccctgctgttggtgattacatagcgttaatgaaccatctaaacgctctaaagttacatttgatagcagtactgccatgcccataccgcttttgcttggcattaactgccctcctaatgcggacatttgttgctcactaaaaccttgcccaaaatctcttaaagaaagcgacagttgttggttatctatttgccagtgagcttctatagtattttgttggttttttttattcgctaaaactgcattttgtaacaagttcaaaattgctggtaataacatagcatcactcaaaatggagcactgtggtgcatcattgagccactgtaagctttgctcaggaaaatgcaatgtcatggcatcttcaattgtatgctgtaatgtttgagcgctgatcaccttttgtgtttcaccggttcttaaggcatttgatagtgccctaaaatgttcaagttgctgtttacactgtgccaatggcttagccatttcttgcacaatgggatcatcagcttgttgttcttgcaactcttcaaataaaagctgcaaatttgcaagaggtgttgctaattgatgcgtaacttgcgcggcagcaccgtcgagtgttaatagctgctcatgcctaagttgctgttcacgggcctttgcgatagtagcctctctggcccttaacgtgctatttaatgtgccaataacaaatgcgataacaatggcgctgataacaaaattaatccacatgccaataaaatgatgagtcatttgcatttggtgcatggtgtgttcaggcatttttatcaataaaaagctataagctgcaattgccagcactgcggtataggcaagtcctttggcattaacagataccgcagctatcataattggtaacaacaataacgacacaaacgcgttagttgccccaccactcaatgacaaaagtatcgtcaaaaacaataaatcagcagttaactgcattaatacagcagaaggtttcgcttttgttacttttcgataagcaaatatgctcaacagctgaaaaatagcttcaattagaataacggatagtaaaggcagtaaggcaatttgatgttcaaataagaagtacacaaccattacagcaataaattgcactgcaattgcggcacttcttaacaccagtaagcggctaagagccggatcagtttgcatagcggaggtgttaatgattattcatcatccatagaaattgtaaaaacagcacatggcgtgccttgatgaaacaccatttgccattgtttaccgttaaaacgccacaatgacatacgaattgaatagttaaattctgagcgagcagaacgtctaaaggccgcctgatagctcaattgcgctatgttctcgctaagcatacggcctttaaaatgttggttgtaaaactgcggtaccacctcagtcggcaaacgggttaatacttggaacttattaaaagacgtgccatctgctgcaatttcgatgaagtcatcatctagcaaagcatcaagtgcttctgcagattgtcttacctcaggctctaacaactgcctttcggcatcaatcaaatgattaaataaagtttctttaattttgccgcccatagtaacccttactgtttgagcactttaccgcccttcataacaaagttaacttgtctaagttcactaatgttatcaagcacattcatattaacgctgataatatctgcttgtttaccaacactcaagtcaccgaggttatcactttggcctaatagtttagcagcttcaacagttgcggacttaattgcctcttttggtgtcataccgtatttaaccagtaattcaaattctttggcattatcaccatgcttagacacccctgaatcagtaccaaaagcaattttcacgttatttttaagcgctaacttaaacgatgcttccatcttgggcgctacaacttcgactttatcagcaattgcttttggcatatttgggttattctgcacttcttcttttactgtagcaccagcaagtaaagttgggactaaataagcatcttgctttttaaataatttaacggtttctttatctaaaaatgaaccatgttctattgaatcaacccctgctctgagtgccgcttttataccttgtgtgccatgagcatgggccgttaccttgcgacctaaatgatgagccgtgttaacaatggcactgagctcttcatcagtaaattgttgattcacacccgctgcggtattacttaacacaccacctgtcgcggtaattttaatcacatcggcaccacttttgataacatcgcgtaccgcacgagtacaatcatcagcaccatcacacacacccaagccaccgccttgtgttgctttggtaatatcacgacgatagccatgcatgtcaccgtgtccaccggtcggtgtgatcatgtctcctgcagcaaaaatacgcggaccaacaatgtcgacacgttcaacagctcgctttaatgggaagatcactttatagctgctaccaaggtcgcgcacagaagtaaaaccggcatcgaccgtgtgctgtaaatattttagagaacgaagtgcataatctgcttcgtattcagttgcccattggtgtgggttacgctttgcatcacgctcaaaggtaacatgaacatgcatatcaatcaggcctggtaaaaccatctgattttttaaatcaataacatctgcattactaaggtttaactgctgttttgttaaatagcctgctttaattgcagtaattttggtatcgtcaataaccagtgtttgctgctctttgacatcttgctctgtgcctaccagcatttttccagcgtgaataatggtggtttgtgcattaaccgtaaacgaagataataaggacagtaccgataatgtgcttatttttaagtttatttttttcataatcgcctcttttttatactaggtttaacttaaatatcgaacaaatgccattatttacgacgcagtaaagcgttaagctagtgttgagaggtgatttttggtataactttgaaaaattttaacaagtctgaccacataaagagaacacattatgtcttatgcccaaattactggctggggtaaatgtataccacccgctagcattagcaacgatgaaataagtaacattgttgataccaacgatgaatggatcactacacgtacaggcattaaatctcgccgtgtcagccatgtttctactgctgaacttgctactgttgctgcaaagcaagcccttgcttgtgcaggtgttgatggtaaagacattgatcttgtacttcttgcgacttgtacgccatcaactatggtggcaaatacggcctctttagtgcagaaaaacattggtgcggttggcgcagcagcaatggatactaacgctgcatgttcaggctttttatatgcattacaagcagcaacggcacaaattcgtgcgggcatgatcaaaaaagcggtcgttattgctgctgagcgcatgacttggtacatcaactgggcgcgccgcgacagtgctgtactgtttggtgatggtgcgggtgccgttgtgttagaagcctcagatacgccatcaggcttactcgcgactaaaacaggctgtgatagtgaagaccgcgatatcctgcatattgagaactttggtagcgatttaaataaatatgagccaattggtccatcaaatttattatttgaaggtcgtgagatatttaagcgtgctgttaaaggcatgagtgaagcctgtgatgacgtgctaaaccaagcgcaattgcaacttgatgatattgatgtattagttcctcaccaagctaatttacgtatcatccaagccattcagcaacgcttaaaagtagctgacgacaaagtcatggtgaacattgccgattacggtaatacgtctgcagcgacaattgcaattgcaatttgtgaagctgttgagcaaggccttatcaaacctaactcaaatataatgtcagcagcctttggtgctggtttaacttgggctgcaagttatattaaatggggcgatcgtgtgacaccaattgcggtatctgatgctgctctacctgagtgtgataaaacaggtcttgaacttgttgcgccagctgttgcggcatgtaaagcggcagagtaataccctacactcattaatagaaaagcgcggcttagtccgcgtttttttatgagcataaaaggattagaccatggaattattaggcatacatcacgctgcaatcatctgtagcaactatgaaaagtcaaagcacttctatagtgaagttttaaaactgccgattattcacgaactataccgcgctgaacgtgactcgtataaattagatttagcgcttcctgatggcagccaattagagttgttttcgtttcctggcgcgccacaaagaccaagctacccagaagctcaaggacttcgccatttagcgtttaaagttgccgatattgcaaaatcaaaacactatttagaaacacaaggtattagcgtggaagaaataagagtggatgaaatcaccgggaagcaatttacgttttttgccgatcccgatgatttaccgttagagctttatcaactctaaattattggaagcgatcttgtatgtaattgaacacggcgcgaatacccagtgcctcaccacctgtagggcgacctggtaatgcacgtaagttccaagccataacatcaaagtgaacccaaggagtgcttggttcaataaactcttttaagtaaagcgcggcagtgattgcaccaccaaatggcgttgaagcacaattggcgatatctgctacatcactttttaataatgctttgtattgatcaaataaaggaagttgccaaacagggtcatgacagctttcgcctgcatctattaatttgttcgcaacatcgcgattattggcgaaaaagcctggtaattcagtacctaatgctactcggcaagcgcctgttagggttgcaaagtctacgattagatctggattatcgttttgtgcttcagcaagtgcatcacacagaactaaacggccttcggcatcggtgttatcaatttcaacagtgatccctttacgtgttttgatcacatcacctggtctaaatgcatttctagaaaccgcattttcaaccgcaggtaccaatacacgtaagcgaattggtaagttggcagccataattaactgtgcaaggccaataacatgcgcggcaccgcccatgtcttttttcatgttacgcatgcctgaacttggttttaaatctaaaccgccagaatcaaagcaaacacccttaccaactaaggtaatctgcggagcatcttttgcaccccaacgtaaatcaagtaaacgcggtttgttttccgaagcacgaccaaccatgtgaatcgttgggtaattttgctctaataattcatcacccacccattcgctgaactcaccatcaaaggtgtcagctaaatcagccatcacttgtgataaatgttgtggcatcatatctgcagcaggtgtgttgactaaatcacgcactaagttgattgcgctggcatgctcagttaaacgcttaactagactttcatcagcaatagcaagctgcgctcgcggtgaagctttttctttatattcactaaactcgtacccacctaacacaaaaccaagtgcaacttgctcaacgaaagtgtcatcaccctggatttgatagcaacctgcaggaagtttcgtagataggtcgcctgctaaccaaaagtcattaagatcattaactaagcaataaacatgctccaatgaacccaactcactatcagcaataagggcaatgcctttatttttaaaatcacagtttgataaccagttttgaagtgattgtggttgctcagttaaccaatcggtaagatttgcttttgcaataaaagaaaggggaatacccgttgaagaatggcgaattaatgcactcattaaacgactcgttataaagaaaagataactaagcataccaatatcttggtacaaaaggtataggcaaaatcagattgccaaacccaaatcagtgtttgttttgcttctctttttcttctttttcgacttgttggtctagctctttaagtgacttattaatattgaaagaacttggtaatacatcaacaccaacccactgccctaacttaacaacaagggggatggtaatgggtgcaaatggcaatacagcaaatacacccaaacctaagcctttcaagatatctaagaattgttcattagcagtatgtaactcttctttactagctaggccttgagtgtaccgcctatatatatgaagcatttctttggtttcttgcttttcttgagcaagcgcgattttaagtgctaccatagcgcgcttaaaacgtaatgtttgacgctttttggtaattttggctactctgaacggagccctatgaataactttgtataatcgcatttaggtattttcacacagcatacgaagttcacaaagcataatttacttatattagtttttgacttatccttagcactctattattaattatttttcattaattcaaatggaccaaaaacaactaaaggacgagcaaaaaccaacaaagcccgcttctgatgaatgttgcggtggtggtagctgttgcccatgcgtgtgggatgaatacaaagaaaaacttaaacagtggcaactactgaacgataagcaacaaacaaaatagaccgttccaattccttttttgcctacatttcactcaaaactttctgtttttaaaatttttttagatattttatataaattttcacaaaaaaataaatcgcaaagaataaattatccccttaaaattcatgcacataatccaaataaagtgaataccagaataaccaatacaaccaaaacaacattaaattaacaatttgcaaattattttcacagtctgtataagttatttacaccaatttagagttggtgacctaatcataactattctaactggggaagtcagaatgaaattcaaaaatagcgcgctgcaacaagcaattaaatttgctttagcaacaacaactgcaggtctgtttgtatctggatctgtaattgcggcagaagaagcaactgaagaaacaaaggttaataaaaatgtagagaagattgcggtagttggtacccgctctgcacctcgctcaatcggtgactcaccggtaccaatcgatatcatcggtggtgaagagctagacaaaggtggtaacaccgatatgcttgagctactaaaaggctctgtaccatcttttaacgttcaccaaaacccaatcagtgatgctgcatcacttgttcgtccagcaaacttacgtggtcttccttctgacagtacacttgtgcttgttaacggtaaacgccgtcaccgtgcatcagtaatcgctttcttaggtggtggtatcaatgatggtgctcagggtgccgatatctcagttattccaagcattgccttaaagcaagttgaagtacttcgtgatggtgcagcagctcaatacggttctgatgctatcgcaggtgtaatgaactttgtattaaaagatgcctctgaaggtggctctttcgaaattcgtcaaggcgaatactatgaaggcgatggcgatacaacgcaaatttcaggtaacgtgggcttaccatttaccgatagcggctttgctaacttaagcttccaatataaaacagctgacgcgacaagccgttcagttcaacgcccagatgctgctgcacttaacgcagcgggtgtaccagaagtatcttctcttgcgcaagtttggggtgcacctgaggtagatgacgatatctcgatcttcggtaacatcggtttagatataagcaacacagcgcaattctatatgtttggtaactactctgagcgtgatgtacgtggtggtttctactatcgtaacccacatactcgtccgggtgtttattcaaatgatggcggtgaaacactacttgttggtgatttaactggcgatatgagcggtaactgtcctaccgatatcatgattgatgataacgttttagataaccaaagatacatcgatctagttgctaacaacccagattgttttgcgtttaacgaaatgcttccgggtggttttacacctaacttcggtggtaacatcacagatactgcattaacaattggtactaaaggtgaaatcacatctggtttccttgaaggtgcatactatgacttaagcggtacagtaggttacaacgaatcacgctatttcatttatgacacaatcaatgcgtcattaggcccagatagcccgcgtgactttagccctggtaagtactcacaattagagaaaaactttaacgctgatttatcaaaaggttttgactttggtttagcgtatgacgttaacgttgctggtggtcttgaatggcacgaagaaacgtttacagttgtatctggcgacgtagcttcatttactgcgggcccactaacagagcaaggttttggtatcggttcaaatggtttccctggtttcaaaccatctgatgcaggcgaatatacacgccgtaactatgcagcgtacgttgatgttgaagcaccattcactgacgacttcctaatgggcttagcgctacgttatgaagattacgatacattcggttcaacaactaactataagttaactgctcaataccacttaactgaagacctgaatattcgtggttcaatcagtactggtttccgtgctcctacagttggtcaagctaacgtaagtaacgtacaaactaacttaagcagcggtgttctagttgactcagcactattaccaccaacaaacccaattgctgtgcaattaggtggtacagaacttcaacctgaagaatcgcaaagctacacttttggtgctgtatggacaattggcgacttattcttcactattgattactacaacatccaagttgatgatcgtatcagtcaatcagacaaaattgagttgagccaagcagacaaagacacgcttgaagcggctggtgtaccaaacgtacaaaacttagcgcaagtaagcttcttcacaaatgactttgatacaacaacacaaggtgttgacgctgttgcaaactattcaactgaattattaggtggtagttcaacattcagcttagcgtataactggaacgacactgaagtaactaagtcgagcccaattacaggtgaatttaaagtaagccgtttagaaaatgacttaccaaatcaccgtgcaacgcttagctgggcacaacagtgggagaacttctctgcatttacacgtgttaactactatggcgaataccaaggcgttcacgtagattacgatgcaacagctaaaacagctgatgcagcagtaacaattgatgcagaagttacttacttcctaactgaagaaattagcttgtcagttggtgcgacaaacttattcgaccaagaagcagaaaagcttgatttcttcgaccgtactggcatccctaataacaactggggtggtaaatactacgagacttcaccatatggtattaacggtggcttctattacgtgaaagctacatatactttctaaatagaggtgctttctaggttgagagatcaacctagagagtctataccccagacttttctggatatttatagttaatcaaggcgaaagacatttcgcctttttcgttttatagtaaataaaaataataaacatcgccccatcattatgctgttagaaaaagcgaatcaactacttgctgaaaacaaactaaaagaagcagagtttcattttaaaacgattcttgatgctgaacccgaaaatggcgaagcattatttggtttagggcgaatcgctctgcgcctagaacgctatgatgcggcagtatatctattacagcgagcttgcgagcgactaccgcacatgctcgagccactgcatgccttagcggatgcttttaatggcgttcactcaccgcaagatgcagtgactgtacttgaatacgcaaaatcaattgccagccataaccctgaaccacattattacttagcccaacactatttgacttatggcgaactcgataaagcctataacatcttaaaacatgcgctaactatgggtaactaccctgtaaaagcttatattttatttgagttggtacagtttgctcggtttaacaacgaacaaaactacataaacgaactccaccacttcttaacgttaaccgataacgtccgcttaaaaatggtctgttactacgccctcggcaagagttacgatgtacttggtgatacacaacaggcgtttgattattacaagcttgcaaataagtttcagtctaaattgacgcaatttaaaaccgctgagctagttccattttatcaacgtgttattgaacaaagtcacgcccaattaattgcctcacgcgataaaacttttaaagggacagttacaccaatattcataattggtatgccacgtagcggctctacactcatagagcaaatgctaacaagtcatagtgactttgcgagcctcggagaagatgccagtatcagtaatcaggttgttgcttatattgaacaaaaaactcagcgcccctaccctgattgcttagctgaattagatcaagggcttatcaacacagcccggaatatttatattgaacgcttaaagcaagcaccagtggtgcgcccctttatgatcaataaactaccttcaaactatcaatcacttgggctaatttatttattgtttccaaacgctaaattcatcaatatgcaacgggattacaatgccattgcttggtcggtgtttagcaactacttcgcagaaaatgagccctacttttgttctctacccgagtttaaacaatactatgatttatatcagcagttaatggcacattggcacaacgtagtgccagaagctatttttgatttaagctatgaggaactagtgagtgaaagcgaacaaacattaacagcattgtgtaaattcttaaacattgagtataacaagcaatttttaactttttataaatcgaaaaaaccagtggcaacgctcagtaaaacggctgtaagacagccgcttaacgacaaagcaattgataaatataaacgctacgagagcgctatgcatacgcttatgaatgagcctcaaaccagttcagcagatcaacaaactgatcaaaacgcgcctgtgggtgagtaagcatatttatgtgatcataatcgaccttatgaccaaacttacggccataaatggtcatggtttgcttgcctgtgcccgactcttccataaactttgcaatatcaattggctgacatagtgctttatctttgacacccgcaacgtgcatgataggtggtagcgctttatcggctaatgctttggcgtaatcaaagccatcatcggtgtcgacccaaggtttacgtttagcccattgcatgctttggtaatgcgatttacgggtttcatcatcactgccccatttcagttttttagccggcacaaaaccatgcttacgggcaactaatggcgccaagccataccaaattaaattaccttgaatatacttgctcggatgatgattatacaaagatcgtttagaaccaaaatagccgcaggctttcacatcattaatcaactcaggaaaacgggcaaacacactgttcatcaacaccccgccccatgagtgagcaacccaataacgggcaggctcgccttcaagctgtttaattttatctagaaatgcaggaatatcttctaaaattgcctcggtctgaccatactttgcatgctttgaaatcgcaggcttactctcaccacgaccgcgcaaatcagctacatagcaaacataaccatgctcagctaaaaatggcgccaagcctttgttgctgtgggtgtaaaagattttgccattttcaacggcaccatgcataaaaaacaccgcagggcctttcgcatcagtcttactgatacgacgtaaatgtaaagtttggctttcggcgagtttaataaacaccgattcttgtttaatcgtcacgtttgacctttttattcttatagactcatcgtaccagtgttaagttacgccagtctatttagcaaagcaagtttgttttggcgattgccattcaaaatgagaatctcaggcacgatgagattttgattaaatagtaacaccaatgcagagccattattcattgatgttagaagttcgacttgcagaagcctttggctaaatgatcactaacgaaaagctatgaaatgatgctgaaaaagtttgtttgatgatttctatggtttcagggctaatgtctttatagataaagatgcaaaattttaagtatggagcacagaaacgaaacgttagggcatgcctaaccaacaaacattttccgtaggcttcagttataagttctagcaaccatgatgcataataaagtaggcaatatatgagttattgcttactttattaggcataatttaggtttattaatatctttaagctatcaaagcttagtatttcctttactaaacaagagcgattatttttgacgaaaaactttctctagtaggcttaaagaccttcatcaagattatggaacaatgaagcattgaaacgaaaaatcaaaatgttattttatacctagatattcaaaacatactgaatgagaaagcttctggatttaaaataaacctaccggagtcttctttaattcgaacttctcatatcaccttaatatacaaatcattacgaattattttctgtttagaacatcaagcaaatatcctttggactatggtagcaagaatttagagatgcggcttgtgcgcacaaaggtgttgataaaggtcgatccgtaataaaacgctcaagaaggaacctcaatgtttagctaccctgaagaatagatccttagagcatttacgttaactcgttttggggcagttatatttataacccatctttggacaaaaacacgttagagtatttaatcagtaatgcccacataaacggcagccgaagcgaagcgtaggctgtccagtggaggccgcgctttttgcggccggaacgtgtttgatgtgcttgttataccttttacgcatttggaattttgaccagtaaatcagtaacaccaacctcaacacctgcttggctaagaagagtggaagcttgcccacggtggtgagtttgatgattgaaaaaatgctgaataaggtgaccaaattttttgttaaacggctcacctttggtattgctatacgacagattagattccaatgcttcgtctgtaagttcatgtgcaaaatctcggataacctcatccattttgattcgcgcactctcaagatttttaaattcagggtacaaaatggcgcccaaggcttttggggtattaagatcccgaacgtaatcaagagttttcaattttgatgggtgatcagcaaatcgcttgagccagattatgtctccaacgagaatgtgattaagcgtgccgatgattgatccaaaaaatgctcctcgatcattagatagatcatcggcgttcaatttggatgcggctagatagatgcttttattcatccactgattgtaatctgccatcagctcaaaatttaattttaatgacatgactttcctttaggtataacgccccattcaggggcttttaatagttggctaaaataacgaacgcagtgaggaaagccaactgttaaaagtcccgcactgcaatggcttgttatgtagccgacttccacgtactaacaatttcttcatacttttcgtcaaccaactcttcatcatcggggcacgaaaataaaactacttgaagagcattgtacgagtttggaaactttgaaagtttgaccataatctccagtgcctcgttgtcagttagctcctctttattaatatatgagagtgcagcaggttcaacgattttttgtacaggactagaaaaggactctttccagaaatagtacatttgtaggtgcttagcttcttcgattttttctgatgctggcactctacatatttcgtgcagcaccataaagggagcgtcaccaccaatctcgatagattgctgaataattcgtttccattcactttcattgtgataaggaaaattgcaatcaatactgtaataaaattcttcgtaggtcatacaaacgccgatctatccttggctacataacgccccaatcaggggcttataaccgttggctaaaattgtgaagcgaagcggaactcagccaactgttagaagtccctgtctgcattggcttgttatgttttcttatacacatagaacctaaatatcattgcttgggacaatgcagtcaaagcaaataatacagagtcctgattttgaacgaagtacaaaattaagctaactaagatactaactgccacatagatcttgaaggaagcatttgcatatttagaaattacccaatgaacaggaaagccaacacatagccacccgaccaacgatacaattaaatagacacccagaaaaagtaaacttgataaaagtaagccagctatatcactagcagtagtagggaatgagcccataaccagagttattacaattattcctaaggcgacccatgacaagcttttaattattgcgctatcccagcttcctaagttcaccattcctccttgaaaacataacgccgcaaataaacggcaaaaattagttggctaaacttgtgaggaacgaacaaagccaactgatttttgtccgccctttttaatttgctttgttatatgcctgttgtctctattttatggccgtaaataacaaggtgattaataatctctcgagactcggggttaccaattaactcattggttaactcatgacctccccaatcttctgtcattagatgatcatgtgcatttccagacttttcggcttgcgctgcaatagcctctaatcgagatgctaaccagcgaagcttttctggtgatgcatgaatgaaaacttgttcagctttttcgtctttttctaaagttaacatccgaacccttttggcatataacatgtttatagcgagctaatcgcgcgtttttctaccacagcgtagctcgtttttcttattagattatttctaacaaacttgttaactaattaccagtgttattaaaatttaggagttctcgcttttacctcaggataaaaacgagcgattgggtcgttttcttgactatacgagcgactgagctaaaactgtatatatatacagcttcatttcaaaggaatgaaaatgaaaactcgctctccttatttaaactacattgcagactatatgctcactcgtcagtattcattaagaacaattaatgcttatttaggttggatcgcaaaatttattcactttcacaacaaacgtcacccaagctcaatgggagatgcagaagtcaaagcgtttttagaccatattgtattaaaacgtaatatgtcacctagaacacaaagtgcagctttaaatgcgctcgcttttttatataaacatattgtcaaaaatgagctttctttaaacttgaattttgcacgaagtaatcgacaacccaagctgcctgtagtgatgacgcctgatgaagtaaagcaattgatgagtcatctttccaagcgatattacttaatcactgggttaatgtatggaagtggtttgcgtgtgatggaagcggtgcaattgcgagtaaaggacattgattttgattacaaatgcattcaaatttggaacggaaaaggcaacaagcatcgtatagttactcttgcaacggagttgatcccattacttagaaatcaaattttgcaagttgaagaatatttaagattagatttacaaaacgagcgatacgcaggtgtgtggatgcctaacgctttaactcgtaaatatccctcagctaataaatcactagcgtggcaataattatttccttcctacaaattaagtgatgacccagaaactggcgagatacgtcgccaccatttccaccctacatgtgttagaaaagcgattaaaaaagcattaaagcaaaccaatattacaaaggttattacgcctcataccttgcgccattcatttgcaacgcacctattgcaaagtggcgccgatattcgcaccgttcaagcacaattgggccattctgatgtcaaaaccacacagatttacacccatgttttacaacaaggagcaaacggtgttgtaagcccattaagcaaaattttctagctattattaaagatgcgttaacttatcattcaatgtgtagggcttggaccgtttcttgattgctcaaagcagcagttagagcatttaaactaacttattttggggcagaaacaagttagctttttcatctgtccgctttttaaaatcagacaaaatagtaccgcgcgatctaaactttatgttacataacacccttattgctcaattacttgtactattttcttttctgcttccttcatagtttaaactaacgtcttactcaaaaagcattatttaacgcagcggctgctgtttcgtatttataatattaatcagctgtcacttacctcaattagtctttacactcaaaacctttagagtcaactttggcaatgttgtctttattgccacacgctttaattgccatttcagtgtgattgcgctcattgtattgtttagcaattgcgccaaggcttagcaaaattactacagctatcactatttttttaaatttagacataaacattcctttgaaaacagactacttaaaacacaacgattttgctcttttgatggggcatagaggctcacattaccagttgcttgagacgtaaaggtaaaaggacaaagaaagatactattagtcattttttataagcttccttgttgtttttaatattcaattaaaatacacagaagctcgattccttcgattgtctttaacaagataaagtgcttcacctgcatttttaattattttttctaactatttcaagttaaatatgatttttgcatatcatgcttttaatgagactaagcaaaaatatccaccgcaaactaactcagaacaaagatttatttggtacaatcagcctttgatatggctaacagataggttttccttaatgcatccgcgaaatcgccacttaaatggctacgactttactttgctatgcaaagatactcctgccctaacatcttatataacacaaacaccaacaggcactgataccattgatttcaccaatgcattagcggttaaaaccctcaaccaagcgttattaaaaagccattataaaatcgatttttgggatttgcccgacaactacctttgccctcctgttcctggcagagtggattacattcatcacttggccgatttattagcaagcgataaccaaggtcatattccgaagggtaagcaagtaaaagttcttgatgtaggcacgggtgcaaatgtgatttacccgcttacgggtaatcacgaatatggctggcacttcacgggctcagatattgatgctttgtctgttaaaattgccaaacaaatcgtgcaattcaaccgccttaaaattaatgttaagcagcaaaacaacgccgataaaatgtttacgggcgtgatatcgaataaagatgtctttcacctaactttatgcaacccaccgtttcatgccagcgagcaacaggccaaagcaggtactgagcgcaaatggaaaaacctaaacaaagcaccacaaaatgcgcttaattttggtggccgccaaaacgagctttggtgtgaaggcggtgagcgcgaatttatcagtaaaatgtgtattgagagccaagagtttgcagagcaatgtatttggtttacatcacttgtttctaagtctgacactttaccgcatataaaagaattgcttagcacacttgatgtgaaagacgtaaaagttataaaaatggcacaaggccaaaaaatgagtcgctttattgcttggagctattttgaccaagctgaccgcgaagccattcttaacgaactagtataaggataataagatgatcgactttcgttcagacacagttacaaaaccaacagcagccatgcgcgcggtcatgaatgacgccccagtaggcgacgacgtttatggcgacgacccaagcgttaatcagcttgaacaatttgctgttgagcgccatggcttcgaaagcgccctttattgcagctctggtacgcaagcaaacttactggcattaatggcacattgtgagcgtggcgacgaatacatttgtggtcaacaggcgcataactacaagtttgagggtggcggtgccgctgtattggggtctattcaaccgcaaccaattgaaaataatagtgatggcagcatagatttaaacaaagttgtggctgcgattaaagctgatgattttcactttgctaaaaccaaactacttagcttagaaaacaccattggcggcaaagttctcccgcttagttatcttaaacaagctagagagtgtgttgataaacataaccttgctctgcacttagacggtgcccgcgtgtataacgctgcggttaagttaggtgttgatattactgaaatcacccagtattttgattctgtatctatttgcttatcaaaaggactcggtgcgccggttggctcactattattaggtagcaaagcattgatagataaagcgcgccgctggcgaaaagtacttggcggtggtatgcgccaagcgggtatgcttgcagctgcaggccagtatgcacttgagcatcacgtagcaaggcttgctgaggatcacgataacgcagcgtatttggcagagcagctaaacacgttaactggttttgatacatcgccttttcaaatcgataccaacattgtttacgcaaatgttgccgaacatatcgatttaaaagcagtggcacatgcgttaagagagcaaaacatgctgttttcaccgggtaaaccactgcgcctagtgacccatttaggcgtcactaagcaagatattgatagctttatctcggcattagcggccaagatttaacgcttctttataatgtttgcggcacaccgatacatatcggtcgttgccgccaatttctacctgattaccgtctgcaatcgctttgccatgctcatcagtacgcaatacatgattagctttacgcccgcaatgacacaccgtctttaactcaataagtttgtcagcccaggcaagtagatattgtgagccactaaataactcacctctaaagtcgttacgtaagccataacacagcaccggaataccaagctcatcaaccacatctgttaattgcattacttgctcttttgataagaactggcactcatcaactaaaatacaatggcgcttttgctctgcatttaatgatttgatcaattcaaatacatcgatatcagcatcaaaaatatgggcatcagcttgtaaaccaattcgtgaagacaccttgccaacacctgctctatcatcaatagccgcagttaaaataactggttccataccacgctcgcggtagttaaatgcagattgtaaaagtgtggtggatttgcctgcattcattgcagaataataaaagtacagctgtgccatgatgttgcccaaattttaaagtcgcaatatgctaccttaatcgcgcgacaacatcatctattaccttactcttattacttgaaaccttgtcccagtaaaattgctgttttataacaagccttcgtgcttcagtaaccactcttttctttcaaggccacccgcatagcctgtgagtttaccgtttgcgccaataatccgatggcacggtacaataatgctaatcgggtttttaccatttgcagcgcccactgcacgcaccgcttttgggttattaatggcaagtgcaatatcttggtagcttttgctttgaccaaactcaacatccatcagcgcacgccatacttgcctttgaaagtgggtaccttgggtatctagtggaacagtaaaacgcctacgctcgccgttaaagtattcattaagctcactaatacatattaaaatgggtgtaagggtgtgctcatcaacagcctctgtttgcattgcaaccaccgggtaaaagccaacgtaactgacgccttttgacgtactttgaatggtaatatcgccaatcgggcttggcataataacttgttgcatactcataattgttgccatagttgaaaagttaaataagagcgaaatggcgcacagtgctcgctattaaattcgcttataccagcgagggcttttttaacccctaagtcgcccgccaatagaatatcggggtggctttgaccgcgtagtttggcgtaattaactgtccatgggccaatgcctttgagctctaaccaattatcaagctcttgattatctgggttttgctgacaataaacacttaaacgccgtagcgcatctttgcgtgattgtggcattttaaaaaaatcgagttcagaattggcaacccattcagggcttggaaaatagtggttattactttgctgattaaactcacttacaagctgtgtaacgagattgtgagccgctgtaacactcacttgctgaccaagtaccgcacgtatgcccgcttcatagtctgaccaaattcccggcaaacgcagcccaacacaaagcggcatcgcgccttttagctctgcatttaaatgctgttcaatagtgtgcgtgtcggcgtctaaatcaagcacacgacgaatgttatggatcacttgctgtaaatagcgggtgttatcgatatcaataaccactttaaaatgatttttatgctcaacaaaatgcgctgtgaattgcccttggcaatatttatctttaaaagtgcgaccatagctcgttgcgcttagccattctagaccactaattaagcggcgctgtaaaaagtcatggagtgcttgccagttataaggcggcctaaatgccagtgttagagttaatgttgatgctggttttttatctgacttgcgtaactttgacggggcgatatttaactgctttaaaaaagcatcattaaaacgacgaatactattaaagcctgccgcaaatgcgatatcagctaccgacaaatcagtttgttgtaatagctgcttggcaaaattgcattggttaaataatcgatattgggtgatcgacagtccaaaatgttggttaaacaaacggcgtaaatagcggctcgacacgccgagtctgtctgctaaaacctcgcaatcgtaggcctcgcctttatcaatcagttgtttggcacgtaatgcggtggttttagtacctaaccaagctgggctattcggagcactgtctgggcgacagcgaatgcagggtcgaaaaccatcttgcgcagccaagtgcgcatattggtaatactcaacgtttttttcttgtgccgttggtgcagggcaaattggtctgcaataaatgcctgtgctttttacagctacaaagaacaccccatcaaagcgtgggtcgcggctttgccttgcagtttgccattgttggctagtcataattattctcgttacacgctaataccgttagcttaactgaatattattttttgactagccagtttcggaccttaactattttttaattgcggctaaatatcggcgctcaacttccggccaattgatcacttcgtaaaatgccgcaatatattcaggacgacgattttgatacttcaagtaatatgcatgctcccacacatcaagccctaaaataggcgtgtgattttgcatcagtgggctatcttgattaaggctactttcaacaaccaactggttattatcatcaacacataaccaagcccagccactgccaaagcggcttaccgctgcattagtaaattgctctttaaactcatcaaagctaccaaacgtatcaacaatggcggtgtttaactctgcacttggcataccgccgccattaggtgacataacttgccaaaataatgagtgattatgatggccacccacatgctcttgcactgctttttgtaatgactcaggcattgatgaaatagtgcgtagtaatgtttcagcatcttgctcagagtaatgactgccctctagtgcagcattcgctttattgatataggtttgatgatgcaaggtgtgatgaattttcatagttttcgcatcaatgtgcggttcaagtgcatcatagtcatatgctaaatcgggtaatgtaaaaggcatactgattccttatcgttagtgtaataactgcgttttatggggatagtcagctaatagctgattgattcggttaataagtaccggaaatgccgatgccatgctggcaaacttaaccagttcataataggttttatggtgatggtgcagcaccaaggtgcgaacctgttgctctgggtgattcaaaagcacgcttaatcgttgatgagcatggcaaagccaggtgcaggctctatcgggtttttgcattactttaaaggtgtcggcaagattcaaagtagcaacaacaaatgctgcaatacaatgttctagcgagcgtgttaccgactgattgactgggatattagaaaattgcgccagaagcgtttcggcgcagctgcttgcaaccgtgtaatgatcacgtgcagtaataagctcgccagtttcaaatgctaagttgccttgataaattgcactttgccaaggggcaagcgcatcatcaatggcgtttgcagttaaaggtgtgtggcgtgttgtttgagtcataaaaatcacctgcacttataccaatctttgtatgtgtatttaaactacacacagaaaaggttaaatgcaaatgatttttatttatgtttgttaattttaagctatatcaaaattacttattgatgcgcaaagtcgataagctcttggcctgtcaggcgataaataatccattcgttttgtggtttagcaccaatgctgtcgtaaaaatcaatggctggcttattccaatcaagtaccacccactcaaaacgaccacagtctttttcgagtgcttgcttagcgagatattgcataatttgcttaccggcacctttaccacggctatctgcactgacgtaaagatcttctaaatacaaaccatttttgccaagccatgtagagtaattataaaaatacactgcaaaaccaattggcgtgtcgccctctaaacaaataacactatgagccgtagcaccttcactgaataatgtttttaaaatagcttgctcgtctgttttaactgcgtcgggttctttttcgtaaatagcaagttcggtaataaaatgtaggattgttgcagcatcactcgcgactgccggacgaattgtaattgcgttactcactctgtattccttttttacatcattattgtaacgcccagtttataagggctttagtatggtgtaaacgccctttacagaaatacacggcattaaaaaaggggctactaaaagttagccccattttgctttatttagtcatcgacttataaagtaccggcagtacaaataaagttaagaatgttgcactgaccaagccgccaacaataaccgttgcaagtggcttttgtatttcagcccctatgcctgtgcttagtaacatcggaataagcccaagcattgaagtaagcgcagtcattagtacgggtctgagccgtgatacagccccttcaaataccgctttatctttgctatcgccgtgacccactcggtgattaatgctttcaaccatcaccacaccattcaataccgcaacaccaaacagcgtaatgaaccctactgaactgggtacagataagtattgcccagagacatacaatgcaatcaccccaccaattacagcgagaggaacattgacaagaataagcaccacttgcgataagttactaaaggcaaaataaagcaataacgcgatgagtaataaggccactggcaccactatcattagccgcttttgtgcccgttgttggttttcgaactggccgccaatcgccacgctgtaaccacttggtaactgcactttatcagcaatcgcagtacgaatatccgcaaccacagagcccatatcacgcccttgtacattcgcttgaatgactatgcgtctttgaacatcatcgcgacgaacttgcggagcgccagactcaatctgtacatcggctacatcacctaccctaacaatggcacccgcgggggtacgcagtcgaagatcagcaatcacatttgggttttggcgataactttgcgctatacgcacataaatatcatagcgctcattggcattaataatttgccctgctgattgcccaccaataccgtgctggactacatccattaaatcagctaccgataaaccaaaacgcgataacgccaaacggttgggtttaactataagctgtgcttcgccgcctatttgctccatcgcgacatctttagcgccaggtatttgctgaactagctgctcaatttgttggcctttttcacttaaaacagccaaatcacttccgaacaacttaatggccaattgagcctttacccccgataaaagctcatctactcgggttgctatgggttgtgaaaagttaaacaaaagcccagggaattgctcaagcttggcttccattagctgttgcaattcgacacgtgaattcgcgttaacccattgatcatgtggctttaaacctaaatagatttctatgttgttaaccggttcaggatcaccccctacttctgcccgaccgattcggctcagcgcatattccacctcgttaaattcaagcaacatggcttcaagctttggagccactgagattgctgtttcgagacttgcagatggagcaagagtcacacgtagattaatcgtgccttcttcaagttctggcacaaattcagtacccagctttggtagcataacagccgctacaattagtaataaccctgcaatagctaaaacgctgcgtttagcctgcaatgctttttgtaaagcccgttgataaagcatatcgataggttttagtaagatactttgctttactgtcacgcccttagcaaataaataaacacacagtgctggcaccacaactaaggcaacaattacagcgctaataatcgcaagcataatactcacagccattggctgaaataacttagcctcaacgccttcaaagctaaacagtggtaaaaataccgtaagaataatcaaagaggcaaaaaagataggccgtgcgacttctttagcagcaattgcaaccagctcggcgggtggcttatgttgattgtgcttcatccctaagtgcctaaatacattttctaccataacaaccgagccatctaccagcatgccgatggcaacagctataccccctaatgacattaagttagccgataagccaagccatgccattacactcagtgctaaaccaatcgaaatagggatcgacaataacaccaaaaatgttgctcttaaatccaacaaaaatagcgctaatactatgataataaatacaaaagctaaaagcagtgcatcaataactgtttgtaccgcttggcttataagctctgcttggtcgtaaattgctttaaattcaaccccatttggcagtgcttgatttatcatctcgacacgcgcgttaatgccatcaatcgtttgcttggtatttgcgcccattcttttgagcacgatacctgtgaccacttcaccacgattgactatttcgccttgatcattgcgtttagataaggtgacagcgccttggcgaatttcactgccaagctcaacattcgcaacgtcagccactttaacgaccgtaccatcaatggttttgataggcgtttgcgcaatttcagtaagccctttttcgcctggggtaaaccaacctgtaccacgaataaccagctgctcttggcctcggttcatataccagccacccacattgctattgttagcatctagtgcgtcactaacatcttgctgtgttaagtcataggctagtagcttattggggtttaagtttacttgatactgcttgacctcaccgccaaatgacaaaatatcggtaacaccatcaataggtaatataagtaatttaaccacccaatcatttaagctacgtagtgccatgctatctatgtttgcatcaggctttgcttcaagtaaatactgataaacttgtccaagccctgatgtgttagggcccattgtaggcatacctacaccgtctgggatcaactctttagcagactgcaaacgttcaaaaaccagctgcctagcaaagtaaatatcaacaccttctttgaacacaacagtgacgcccgataatcccgttttagaaatagaacgaacttgctctacatcgggtagtgcatacataaccgcttctatcgggtatgtgatcagctgctcaacttcttcagccgccagccccggcgcttcggtattaactgcaacttgcacattcgtcacgtcaggaaaggcatctaaattgagttttgggatcataaataaactcacagcaatcgccgcaagtaaggccaatagcaccagtaaacgattttttatcaccgcttcaattaataaattaaacatgcgtcacctctagtggttatgcggatcaaatccgcctttagctagctgtgatgcaataaaaaatgcaccttgggtgacaacctcaagtccggcttcaataccaaatacttcgcgataatcaccaaaacttctgccaagggttacttcttgtgcggcaaaaccaccatcgtcatcaacaacaaataattgccagtcaccatctgcgctgcgagttaaagcattttctggtacagcaagtaccgcttgctctgtttcaaactgaaaatacacatcggcaaacatgcccggatgcaaactatgctgagtgttttttacttcgagcctaacggttcgtgagcgtgtttgttcatcaatggtatgtgcttcttgaatgactgttgcttgatagcgattaccgtttacttctaacagcgctgtcgagccattattaataatacggtcttggttcgatgaaagctgagctgcaacccaaagcgctgattcatcagcaatcagcatcaactcaatccccgaatcaactcgctggccttgtgcgaagttatcggttaaaacagcaccagatgtttgtgcaaataaggtgtattcgccgagtttttctgggcttatagtcagtgtttgagttatagcttgttttgataaaccaaaggcaactaagcggctataagctacttcatactcggctttggcagtcaagatttgctttttgctcaccgtgcctggtgtcattttagttagccgttttaactctgcttcggccaatctaaattcagtttgctggctggcaacttcgccactaaataaggtgactaaagagtcacctttattgacatgttgccctaacaaggcatggcgctttacaacgattgaatcaacgcgcggtgacaccacataactggcataaccattggctttaatttcgcccggtgcatataaggtttgattgtgtgttttcagtacaaggcgctcaaccttgatattagctagttgctgttgctgctctgttaaattgacttcattagcatgctcagcttgttcattttcttgatgttcatgtgcttctttcgcagaattatttgtcacatacataaagcatacgcacagtaatgcgtaacgcataaaatttcttaaaaacatatatcgtctcttacttaaaatgggctaagcccaaataaaatctaaaaagggttttggattaagtaagagctaaaataggtgggcgatgtaacggtgctaaatctgctgatgtgaagtttaaatcgagagattcaattttagtaaaataggtatcagcaggctcggtcaattgcagcgaatcgacaaacacaggactgtgacaaacatgacaatggcctttttcggctgaatcagacaactgtttgctaagttcggtgtgctctaattggtgtagctgatgatcgccattgatagcgcaatgggcttcaagatcaatttcttcagatagtagtaccgaggtgtgattaaacgcagcattatgatcagccacatcaaagctatccagcgtgggctggagcaataatacgctaatcaaaataaaaaatgcagctttcacattgagcctaaaattagaactaaaaattggtacaacggcgttaaattaacaaatccatcagcatttgaacagaaaattataatctgtacacgaacaaatcattataaacttttcaataccacagcacgcatggtataaaaataaagcaaatcaataactaggtatttttatgggacacggacaccaccaccatcacgatacaaataaccaaagcacccgccaactcatgctggcagtggtaattaatgtgttattaaccgtcgctcaggtgattggcggcctagtttctggcagcttatcgttaattgctgatgcgctgcacaatttaagtgatgcctcatcgttattcattgccataattgcccgaaaaataggtgccaaacctgccaatgatcgttatcaatacggctataaacgcgctgaaattttagcaaccttatttaacagtttaagtttaatcgtgattggtggttacttaattgttgaagccatatccaactatttaaaccctgagcccatagacggctggatcatcatttgggttgcaggttttgcactggttgttgacttattcaccgcgcttttaacttacaaagcaggtgcgaaagacagcatgaatattcgtgctgcgtttatacataatgtgtctgatgcattagcgtctgtggtggtgatcattgcgggtaccttaattattctttatcaatggtatgttgttgatttaattgccaccatgctgatttcggtgtacgtcatttaccatggtattttgctgctaatagcgagcagtaaaattttaatgcaggcagcccccgatagttttgcgctaccagaagctatcactgaacttaaagcccaatttgcaatcactgatattgattaccttaaaacatggcagatagatgaccatcacattcattgtgagcttaagtttagtgccaagcaaagcattcaaaacgatgaaatacgtcactttttacatgaaaactttgctattgaaagctgcaccattgaacaagttttagtgtaaatgtatcgcgttatcatttacaattcagttttgttttaacagcaaactgaaggaacaaactttgttgaagttgtggttacgtcgtacgcatttattgcttgccttagtaagcggtttatttttaatttgtttaagcttgaccggcgcgttgcttatttacgcaaaagacattcaataccttactcaaagcgataaatggacagtaacgccagcaccttcagcactagatttcgatgacctcatccaacacgtttcagctacaacaaaacaacccgttaccctgttaatgccagagcagcgcagtgatcttgcttggcaattacagttggcaaacaaccgctatgtcagtgttaatccatacaacggtcaagtgttacatgagtacgattactacagtacaatttatggctttaccatggctttgcaccgctggctgctttatgaagatggcgataaaaaccgccctttaagaaactgggtatcggtgtgtgcgctgattcttattattgaaattctgcttggcttttatatttgggtaaagccaaaaaatcgtattaagcgcttggctattaagcgtaaagcaaagtttagagtgctgatgtatcaactacataccgttctaggtgtgtattttttaattccactcattttaattgcctacacaggtatggcatttaactggaaagaacaaaccaaagccgtattagaatttgtgatgcaaggcacagttgaagatagacctaaaccaccagcagttatttccccttcagctgatacgccttttcaagtgcaaaaagcgtttgataacgcacaaactgtatttcctgagggtaagttatttagaatttatttaccgaaaaaaccaactgataacataggttttagaatagagaacccgggtgaaagccatgcctatagttgggtatgggcaaacccatattcagcagatattgttgcaagctatgatgccagccaaagctcatggaccacgcaaacatggaactttaaatataagtttcatattggtgattttgcagggcctattgtgcaattactatggttactatttgctttatcaccgttatttttcacgatttcgggtgtttacttttggtacaaacggcattacaaatgaacaacttttatcaataaaaaattgctatgaacaatgagctcaaacatgcctttaacactgaaatgatattggctaaaactagttatgcaaagacggattacacaagcgctttttatcacttagagcgggctcatattcttggccaaagctatatcattgcgcatacttactcacattggtggatgtgtaaaattggttttaaaaaccataatgccaaggaaataattggtcagtttgctcgcatggctgcgtcaattgtgttttcgcgtatttgggtcccactcggtaacactggcggcaccaatgttagccctttcaaaccaatgcctattcctgatgacctaaaacgttacttaaactagcatcaactagaaccgcacttacttgtacccttcttatcgcgagtaactaaaaagccataattattattgcaaataattatcattagccttgcctttacacttctttacatttagacttccgcacaatcacataataattaatactgatttaacaaggataaacatgttaaaaacttcacttactctgattgcactcgcactaagtagccaatcttttgctgatgatgccattaataaaaaactcaccgcagaagaaatggaacacgttgttgtatcaggcagccgtgtatttgaaagcattgatgaagtacccgcttcagtcacgattattagccaaaagcaaattgaagagcatttaaaagttaatccagaactacaaagcttattggcgcaaatggtacctggccttgcaccagatacgggtagctcgagtaacacaggtcagagtttacgtggccgtgcaccacttgtgatgattgatggtgtgccacaatctacaccactgagaaacggctctttaggggttaaaacactcgaccctagtgccattgctcgtatcgaagtgatcaaaggtgcgacttcagtttatggtaatggtgcatcgggcggtattattaactacatcactaaacaagcaacaagtgatggtaagccagagggtgaaatcagcctttcgtcacgttttagtgcagtaaaactagaagaaagcgctggtgcgcgagtctccgcggcaattaatggtcgtgccgataaaattagctatttattcaccgcaagttacgaagaaaatggcgttcaacgtgacgccgaaggcgatattctgggcttacagtacggtttatctgatgcagtaaccgaaaactacttcaccaaacttggttatgactttgacgatgagaagcaactgcaatttagctataactactttagctctcagcaaaaaaccgatttaggtgatgttgtaggggatcttaatgatggcgaaaaaacctatgccattcatgtacctaaagagctgcaaaagcaaggtaaaccacaaggcccagatggtaacgaaaacattaccttaaaatacacagactacgccctgtttagtaatactcaaatgacgctcgacctttacatgcaagatatcgagaatgtgtttttcttttctacaaacttagctaacccagaagaaggctacgaaggcggccaatcaattattcgctctgaaaagaaaggggcacgcgctacctttaatacccttgttgattttgacaatgttgaagccaccttcatttatggcctagatgcacttaatgatgtgacgtctcagccacttgtagatggccgtgtttgggtaccagaaatggatatggaaagccttgctggctttttacaaactaagtgggtaatcgataatgatttagttattaaagcgggtgtacgccaagaaagcatagatcttgctgtagaggactatgaaaccttaaaactgtgccgctcagcaacacaatgctcagtaccacttagcgtaaaaggtgacaccattgattacgatgcaaccacttacaatgtaggtgttaaatacaatttacttgaggccttcagcccgtttgccaattactcgcaagggtctgatatttcagatattggtcgcttattacgctctgcaacagtaaacgatattggtctaattcaaacagaagcatcaatcatcgataactatgaagttggttttacctcacagtttgatgacttgcgttttgaatttgcagcttaccgcagcacatcagaatttggcaccacgaatagctttaatgaagcaacgggtgtttatgagccagtacgtgcgccgcaagagatttggggttacgaaacactggttgattataaaattaacccaaccctaaaactggttgcaacttacagctatgttgaaggtaaaaacaccgaagacgatatttacttaggttctcgccaaatcagcccaccaaaaggtacagctaacttaaactggcagcctaatgatgaattatcacttacggtgagttatttatatgtgggttcacgcaaacgctttgaaccaaatgcagacggtgactatgttggcgatcaaggccctattagcagttacaatctattcaacctaagcggtcgttataactttagtaaaaactggcaagcgtttatgggtgttgaaaacctatttaacaatgattactaccctgcccgcgcccagtcatacacctacggtggctataacattaaaggtttaggtaccactgtaacacttggtgcaacttatcgcttctaaattaatttttattagaacaacaagcccttcttagtaagggcttttttcatttaagaataaaaacgataaattgttcatttatcaaccattaacgcaaacttaaacgagaatcacactcaatagtaaataactgatttacaaaggaaaaagtttgcaatcttgtttttatatactacaattaccgcaacttggaattcgaggacagcattatgaaaggtaaccaaaaagtcatcgatagttttaacaaactactcgcaaacgaattagccgctatagatcaatactttattcattctcgtatgtatgacgattggggcctaaataagctgtatgagcgtcttaaccacgaaatggaagaagaaaaagaccacgctgattggttaattaaacgtattctattcttagaaggcgtaccaaacatgactaagcgtcgtgatttattaattggttcagacgttaaaagcatgatgcaaaacgatttaacacttgaattagaagttgttgattgtgttaaagaagcaattgctatctgtgaacaagaaaaagactatcaatcacgcgaagtgcttgaaaagctattatttgatacagaagaagatcatgtgtactggttagaacaacagcttggtctaatcgacaaaattggtagccaaaactaccatcaatctcaaatgggcgaatagaggctaattgtatgaaaggcgataaaagcgtcattgctgcacttaataaagtattagcgaatgaattagtgggtatcaaccaatactttttacacgctcgtatgtttaaagattttggtttttcaaaattagacaaagccgattacaaagtatctattcaaaaaatgaaaaatgccgaccgtttaatcgagcgtattttgtttttagaaggtttaccaaatttacaagatttaggtcgactacgtattggtgaaaactctgaagaaatgatcgaagctaacatgagctttgaacttgattcattacctgatcttaaagaagcaattaaacttgctgaagagaaaaaagattacatcagccgtgaagcgctcgataacatcttaaatgagcaagaagaacagattgattggcttgaaacacagcagcagttaatcaaaaccgcagggcttgaaaattacctgcaatctcaaatgtaatttgctaaaacttcaaaaagcagcctaggctgctttttttattgctagtttttgctattaatcgtcttcacgatcaatgattgacactttattacttaaaattaaagagttagggattaaatgcacagctccttcgcctttaattgtgatatagcgcaaattaagatcaatcacagtgccctttgaattactcacttctatgtaattaccaagcttaataggtttataaagcacaatcatgacaccagcaactaggtttgaaattgcatctttcaacgcaaaacccagtgcaaagcccgttaagcctaagcctgcaaccaacgccgcaacatcaaaaccgagtttcgataacgcaagcacaatagcaatgaataataaaatagcgcgctgcgagttagaaattagccggaaagtttcaagtgcagttgaatcaaaccgacgttgaaactgtttaattgcccggtcaattatgaggcttgctatataaaaggcagcaagcactaaaaatgcttgaataagttggctagtcataaggttttcaattaaaaaataaagcccatcataggcttaaatttgcatgaggaaaacatttattgtttttcaaacacacatgaaatgtcaggtttatccaatgtataagtgatattgccattatctttaaaacgcagatcttcagttgttgagccattatcgtcttcattatcacagcgaaagtagcgcttggttctaacaataccatttacaaagtactttagcttcgagctaacaacacaaaagtttgggattttttttacctgcgtaccgttatgcaaatcactaaagtcaattagtgtgcctaaactaaaaccttgtgtgggtgttttgattaatgagaatgatgcattttggcaaactgcgtcactgccctctttggctgcatactccccttgtttatctttaattaaagacaaaaattgggttttattactcggcttaacatctagcaatgcacttgctaacgctgagtttgagaacaaaaaagcaactatccaaaagtaagatctcatttaaattccataaactataaacacttaattagcatagcatgccatttaagcttggtgaatctaagaaccatattgttaatacgactaaaatatgaatttggttttatttagtcatttctagataagcaattactttatttatgtgctatatctttgaatgatcataattttggagggaatcaaatgaaaataattaaactattagctttaactactttactaacattagccagtacacatagttttgctggtgatgacgagtggaaaactatcgctgagaaaaaagttagttacaagagcgaaactgataccgtaaaccctattaccagcagccgttatagtcacattaaggttaaatgcacacatggcacagtgaaccttaaaagtattaaagtcatcatgaataatggtgaagaaaaggtatttgaaaacctgggtgttctaaccaaagggatgtcatcacgtagcttaagtttaccagacaaaaacgacgctaaactcgataaaataaaacttgaatatgaatctgtaggcagcacagcacttagtatggcaggtgtgaccgaaaaagccgaagttgaaatcctcgcgaaaaaagcaaagaaagatgattaaagttgcgagtcaatgatgtttgaggccatacactttctcaagtagcggcctctttatgccgctacttttttaagagcagacgcgcgaaacaagtttcacgccttcgagtgcccttgtaggtcgccatttatggcgacaaaaaccgtggagattttcacgtaggaacggcttcagccgtcaaccttagatgttcggcgttaaaacgcccttataaacttgtaactcgataactttacccttaatcgcgttaaagcacgacctacataatatcgcgcgaaacaagtttcacgtcttcgagtgcccttgtaggtcgccatttatggcgacaaaaaccatggagattttcacgtaggaacggcttcagccgtgaaccttaaatgttcggcgttaaaacgcccttgtaaacttgtaactcgctaactttaccctttaatcgcgctaaagcacgacctacataatatcgcgcgaaacaaattttacgccttcgagtgcccttgtaggtcgccatttatggcgacaaaaaccgtggaaattttcacgtaggaacggcttcagccgttgaaccttagatgttcggcgttaaaacgcccttgtaaacttgtaactcgataactttacccttaatcgcgctaaagcacgacctacaaacgctcgaaactcgctaactttactcgtgcagctcgttactctctcaacgcttataaagcgcttcaattgttgctgagtcaagcgaataagcattgatcatataacctgctaacgcacctgatgcgttctctggtaattcaagcttttgtgataacgcatgcagtgtaaattgatatctgtgagcgccatgaccttctggtgggcaggcaccgccaaagcctttaaaaccataatcatttgttatttgtacactccctttaggcaaagcattcttgtcagcatttcccgcaccgctcgctaagcttgatactgatttaggaatgtttacaacttgccaatgccaccagccactgcctgtaggggcatcaggatcatatacggccaatgcgaatgcttcagtccctttcggagcattttgccaagcaagttgtggtgataggttatcgccgttacaaccaaatcccttgaactcttgcgaagtactcataaactcaccatgagcaatgtctttacttgttaaggtaaaagactcagcgaatgtggtgccagacaaacatagcaggaataatggcgtggcaattttcaatgttgatttcataatattctccgattaataagaataatcataatacctagcaaagagagatcaaattagtaccaaaactgtcaattattagcctacttcgctcattattgttttacgaagagctgttggagtcgtattaaacaacagtttaaatttatctgtgaatctagattgcgacgaaaaaccacattgctgcgcaatagctccaataggctctgagctgctttgaattaaatgtagcccatgacttaaacgcgctttgtctttaattaactgaaaactactttcttctgcggttaactttcttctgagtgtagactcgctcatcgctaaactagctgcaatactgtttgcatcccaatctcgtgttaaatcactggtgataatagtatgtactttctgagtcagtgttggtggctcaataattgaacctaaatctataaagccctgcaaaaataacacctgtagaagctcttgccttctaattggccataattgtgatggtgttactgcagcccattcaataaattgttttaaggacatttgaagcaaagaatctacttgcccattaatgaactttttctttgctcccgattgatatttcaaacactcaaagtctgcgtaatcaaactcaatcaataacgccatgtaaccaatattttgcggaatgttgcgcatggcgaccttaggtgtatttgccattaagacaaaatcgcctgcattgcagttaacttcttctgtatcaattagtcttttactgccagacaacacaacaacaagtaatggttttgcgataggcacattaactatgtgctgttcatcattagcgcaataaatcgaaaacggtaaagactgatgttgctttactgcgcttaaacctatctctatcaattcattcatatttttcagtgttttttattggagtcgaaggaacggattggaccgtgattcttagttattcggcgtaaaatcttttaccaactttaccctggtggctcgctaactttaccctttaatcgcgctaaagcacgacctacaaaggtgctaaacaggtttcacgtctacggtaggatacattaggtactagggtttaggctctaggacgcgatgtaaaatcgctgctacttgttcggcgttagaacgcctcctacaaactttactttcgcaacttgctaactttaacccaatcaaacaagcatactgtttaacatcattcctggcatcaaaaataccattgcaaaagaaaatgatccggtgagtgcaattgcaagacagcaaaatgccgtttgcattaaaaagacgttgggtttaccagaggcactgttttgaaatgacatataggcaagtagcaagctttctttaatttttagaaagtaagagcgcactactctgatgataggcaagctgtacattgctaaaaaagcaaatacaacttctattccaccaaaatgaaataacagtgcaatctcaggtgagaaccaaccaacaatagctatcaagcaccaaaatgcagctttttgatatttatttagttcttgccatttgatcatcgttttctttgtatttccagttatatttaaattaagtgagcagctgatttgtctaatttagttacataagctttgagctctgcaaactgaagttttttgccttggtgagcattcatcgctttggcaaaatagctattggcttgctgctgatcacctgcatgctcatgaatgattccaattcgaagataagtaaaagcaagattatttgggcctatttctgtttgcagagttttagcgctatcaagctcaagaattcttgcaagtgaatttaacgcatagagcgcactatcatgtgagccatttatgtactgagaatgagcaagttctagctcttttttaagaaactcagctgtaatttcatttgcgtttgtaggtactgctaacgagactaaagcagctaaggttaaaactttaaacatattaaacctccctttaaaatgtgtttacagattaatcaaacgagattaactggtcaaactttatacaagaaagcaaattatcaacgagcttaatcgcgaccaaaaccaatcaactttttgccatttaggccatttttatgccattcggtttgctcttcacagaaaatctgcgcatctaattctttacttggctcttcgtttagactgcctgcaggaacaagcaaatagctgttatcttttgcagtgaatggcaaagcggaaccacaggttttacaaaacgcccgtgataacgcacgaccagggtaattaaatcgcgtaatgtgctgttggccttttacccattcaatagcatccggcgaggtaaacaaatttgcggcatgtgctgtgcctgataattttcgacactgctcgcaatgacaaaagaaaaaacgtttaaagttgtcagttactttgtagcttacttcaccacaacaacacccaccggttagagtttttgccattatatgctccttattattgtgttataaaacggcgtttgacaatgcgctaaaaattaattttaggtaataaaaaagtttatactgacattcagtataatctatgtgattgatacagattagaaaacaatttacgacgaaaaacaataaagataattaattttcaattagttgcattacatctgatgctagtttgactaaaatttgagtatcattttcagaaaaatctcttggctgtgtatcaataatacaaagtgtcccgagtataacaccagtcttagcaatcaaaggtgctccggcataaaagcggatataaggctccccagtaacaagcggattatctaaaaaacgttcatcaaatagagcattagtaactatcaagggtttagtatcaaggattgcatgaccacaaaatgatatatcacgaggggtttcgaaaacatccaggcctactttagatttaaaccattgacggtgtgaatctacaatactaactaatgcgatcggaacacaaaacagtttagctataaaatctgtaattcgatctatatcaacattttcttctgaatctaacaagtttaacgaattcagatattcaagcctcaaagtttcattttcaggttgtattggaaccttcattttctcgccattagacagattgtattaataaactatagtttccattaaccgtttttgttaggacctgatgtgaattattttattaagttcattctgtactttcttttatcaattattggcatatcactcttttatgtcgaaattaacgagtacaaccaacaaaaggtctttaacaaaagccttaatcaatacattgtcaaccttgaagggctagctaaagtaaataaccttattttttcccttcaacgtgaacgcggaatgtcaactggtttaaagggtgaaaaggattatttagagcgacttaacacctatatcaaggcaactaattttagcattgatgatgtgaaagcggccgaacagtcagattattttaaggagtttgcgacgcaagttgaaaatgacataaggtctattagaaatgaaaaccaactagcaagtaaaagcaaagaaagtatttttaaaagctactcggttttgattaccctgctattaaaaaaagtacgaattgttgaagccgagcagcagttttttattcgccaaagtaatgataataaccttgaagcgttagatttatacactttactaagagcaattgaattaggtgggcagctcagagcaaaagttgcaagatacataacatctgaagatgaacaagttaaattagtagtcttacgagaagcacttaatcttcattctcaacataattcattgattaaaaatttatttaatgaccaagatgctaatatctacaataatcaaaacaagctattaatagaaaatttaatcaactcactatctcaaggcaaagcaactggaaaaatcaccaagtttgaatggtgggatatcagtacagcttatttgaatgagcttatagaacacagtaataccatcatctctgaaatgcggttgagtgcacaaaaattaaagacgcaaggtgaagaaaagactttgcttgcactttgctttgccgttattggcgggatattatgtgttgcttcaatatgtatgattattcggctattatcgctaagcaaggacaagcgtttaaactacagtactgcaaccacaattcaacttattattacctttgtgggaataacctctgttttgtttgttgaacactatgcaagtcaaaaacttttaaaatatcaatcaaacattgagatattaagaaacctaaaccttcaagcgatagataatatctatacatttgaccaactttggcaaaagcagaaagccaatcaaatgttgagcgcactttcctccatacaacatcaaaatcatttagattttaacgatatggatctagatgagccccgtgatcttcaatttcttaatagtatgaacctgcaaagtatcatccaatctgagcgtgaagctatcaatgaaggtcgaattatttcaaaagcaattgagacacctgcaaatggtgttatttatctcatcgcaggtttaaaaatctcgcaaagtggattaactaatacactcatagtctatgaggtgagtcttaaccatttgatagctaaagcgcgagagaaaataatcacattagaaaatatgcccagagctggttactttgtagaagacgacttactttcatttaaaagcctgataaataaaaattctaatcaatatgataaatcagagctactcagtgcatatgtatgggatcaagagctaaatttagggagctactcatatgaaagctcaaaaaataaaaatgcgtttttatctactattcaaagtaaatttatctggcaagttagttcgttgtttttcttatttctactaatcctatatgtaagtaataagtcacaacaaaaaaatagaaaacaagcaatactcgcacaagacaatataaaaacaagacagctatttatgagtgcttccgaacagctcgcttctattggcagttttgaagtagacatagagacaaaatgggtaaatacatctgaaggatttagaaacttattcaatcttcctttagatactgaattcgtaaaaataaaagctatcctaaagcggtttgatcaaactcagcgaaacaaaattattagccaattaaaaaaccaaaatttaatgcaaacctctgagttacagttaacgcttgcagaacgtcaaacaaggcacttcaaccttgtttcaaaaatacgcttcaaagaaagctctcaaacatacacattagttggtgttgtaaaagagacaacgactcaagtttacgagtccgaaaaacaaaaaaggatccagcttgaattagactcagctcgcaaagaagctcttaacaaaatgagtgaagctgaaaaagaaagaaaagagacacaaaaactactgacaattaaacgctctacagagaagctgctacaagaagcaataaatgcttttccggcttcgataattatgcttaatagtgagcaagaaattacgatgaaaaacctttaccctgatccgcttattacgagccaagttaatacagctacattcatgggggttgaaatatcaaaaggagataacgtactaaatattattaaaaatttacctttagttgaaaaagatgaattactagatatgttacatagcagttctgcagcagaagaatattgctgcgaattaaaatgcaagtatctcgttgactgttttgagtattggtttgaaatcttattaaagaatattgccactgattcgggaaaatacaccttaatttaccaaacgaatataaccagtaatataaattcagctaaagagttacaagctgctaaagtgaatgcagaattagcaagtgaagctaaatcacgtttcttagcaaccatgagccatgaaattaggacaccaatgaatggcgtaattggaatgttggatatgttgggtgagtcacatttagaccctgaacaacaacatttagcacatgtagcgaaaagctcagcattaattttacttcgtataatcaatgatattttagacttttctaaaattgaagcgggtaaaatgcaattagaatacttagcatttgattggctagacataattaaagagttagctgagctgctggcctaccaagctaataataaaaaattaaagctagccttttacttttcttctgaattagcaattaaacagctaggtgaccctgtaaggctaagacaaattttacttaacctagtaggaaatgcgcttaaatttactaaaacaacagcgactttatctgggttaatagaagtgtctataacgccaagtgagcagccagacttctatttaatcggtgtaaaagacaatggtaaaggcatgtcgaatcaacaagtagataaactttttacaccttttgaacaagcagataacagcattcagcgccaatatggcggcacaggtttagggttatcgatcaccaacaaactggttggcatgatgcaaggtgaaattgattgtcaaagtctcgaaggtgttggtagccagtttgttgtaaagttaccacttaatgcgcagcaagaagttgcagactttccgttcaagcttacagaaataaaaattgccgttgtcggtgatgaagataagtttgaaaccgacttaaatgctcacctcactagactgcaagctaattgcgaagtgatcccaagagaattattcaatgcgcaactagtcgatagtcaaagatatgactatcttattatcactgcagagtctttccaacagcttactacagaaggcaaagacgtatttatagatggtagtcgttgccattatatcttacttgataataaccaagataaattacctaaaccaagcaatgttaatatctctagtctgcctttatacccatactatgcctcaaaggtgagtacacacatagcacagctagaaaatatcatcgctaaagaaaatgaagactcccgaagcttaaactcagcaatgtcactaccaagtattaaagaagctgagcgcttgcaagagctaatacttgttgttgaagacaatgtttataatcaagacttatttaaacgccagttagcaactctgggctttcaatgcgtcattgcggacaacggcaaaatagcactgcaattgctagagcaatttgattttgcgctaattatttctgattgccatatgccagtgatggatggttatgagttcacaaaacaaaggcgcatcattgaaaagcaaaataatctgcctgcattaccaattatcgccgcaactgctaatgctttagatggcgaagagcaaatttgcttggcgtgtggcatgaatgactatttagcgaagccaatattactgcaagaattaaataaaaaattaaaacgttggttaaatggtaaatcgacacaaccaattgagaaggaagatcaagcatctcaaattagcaagttacaaactgagtctagaaacaaagctccttttatacaattagacgtgctagaaaactatgtagggacagataaaagcctacaaaaattgtttctagagaaatttgttagcgactcagagaagctaattaaccagttgaatcttgatgagcctaataatattaaagatattgcccatcagctaaaaacttctgctaaaacggtagggagcaaccaactagctgacacacttcaagaattagaagaggtgagtcagaaaggatcattacaagaaatcgtaatgttaattaagcagtgtaaaatgctgttcaggagtgcacaagatgaaattacatctatactaattaatactgattaagacacccaagggtagaacgtatgttggagcaacctcctttgattctagccatcgacgatagtcaacttgtattaacgcaattagagtttctaatttctaatcaaacaccgtgtaaattcattggttttgattgcggttataaggctttatcaagccccgagatccatcaagcttctctaatcttattagacatgaatatgccttctattgatggtgtagaaatgctaagaaagctaagcgagttaaaccttcagcaaccgttagctctattaagtggtgagaacagcctttttcttaaaaatgccgcatcactcgcctccctgcacggcttgaatattatatcatgcattgaaaaaccattatcagttagtaagttggcagagttatataaagcactatgtcagtttaataaagctcccccttcacaaaagaaagatatcacttaccctagtgaagagataatcaacgcactttataaacacgaatatatcgcttacttccagcctaaagtatgtagtagaactgagaagattattggtgttgagacgcttgcaagatggaatcacccacaaaatggtattgtttcgccattctactttattgagacactagaaagtgcaaatcatacagctgagctcaccaagaaactcttaaaacaaactgtagaattttggtctatcaacagaaccttattatcgaaccttcaatttagtattaatattagtgccaatgaactcagtgatgttagtcttcctgaaaaacttgagcgcatatgcaccgatgcttccatgcccacttcacagatcaccctagagctaacggaaagtaatattattaacaatatacgttcttcgttagatgttcttttacggtttaaactaaaaggctttaaattatcaattgatgattttggaacaggctattcttcaatgaagcaacttaatgagcttccctttgatgaactcaaaattgatcgctgttttgtcaacggaagtgccgaagatccaagtaaaaaagcaatagtagtaagtacctgtgaaatcgcccataaactcggtttagatattgtagccgaaggtgttgagaagtttgaagatcttctattgataaaaaaccttggtgttaagtcaattcaggggttttattactttaagccatgcactcaaactgagtttttacaactatttcagcaaaataaagaagttacttactcaaattctttataaaacgactaataaatgagccactatcaatgcaaataaaagtcgaccacgcgcaaagaagaccaaaagttatcattttatgtgacaaacctacagagttagctggtgcagtagaagtactttcttctcaagttgatgaatttagaacattaacaagccataaagatgctgaagaggttatcgctaccacagagccaaagctcattattcttgccagagagagtgtctcaaaaagcattgaaagttataaattacttgctgagtcaggattattaaattatccgcacgaaaatattctactatgcgaaaataaagagtcagggatcgcttttaaatgttgtattaaaggtattttttctgattactttgtttataaacctatgtacgaaaattatcgctttaagatgattttacataacgcactaaaacgaactcaaagccaaactgaagtcaataaactcagagatgaacactttggtaaaattgacgacgatttaaaaaacttaattgatgaagctgctagttatcgcagtcaagccactgagactttaaataatgcccgtgaaaagctgaataatcataagggtataaatgtcttacaagaccaattactacaagacctacaaaaagagcacctgtcaccgttaatcgactctttagagtctcaacttgaaaaagtggctgaggagcttaaaaagcggttacaagaaagacgcttttctcttgctgaacttgctgcgttattaaatgaaaaagataattctgacacagctgaaaccgttcaagaaacaaaaaataaaactgctgaaatgaaagatgaaccttctcccattccatcagaacagcatagtcccctctctgagacgccacaaaaaaagagcgatataaaaattatggtggtagaagacaacgaattttacagggaaatggtatcgaggattttgattggagagggatatcaggtcgtcagtgttgaaagcgggctagatgcaataaaaaaactgaaaaaacagcgcttttcactcgtgttactagatttattcatgcctaatttagatgggtataacacaactaaaaacttacgcagtatcccaaattgcaaaaacctgccaattgttgcaattagtgccaacaaaaataaagagatcattcgcaagtgggcaacccttggcttaactgcctacattaccaaaccttccacaaagtcttctttgttaaaggcagttgataaagcattactgcaaacactataaccagcccgtttttaatcaaaaacgagctggtttagtattttatgcaaaattagaaatctaagtttgataaaacgtcatcatcaacgttattagacaaggtcactttaagtttaggggtacgagccatttcacgtttgatcgcaaaattagcttcttcgttacgcgcccaactacgacgagcaataccgttatttacatcaaataatagcatagatttcaaacggcgctcggcagcttcactaccgtctagtagcataccaaaaccaccgttgatcacttcgccccaacctacaccgccaccattgtgaatagatacccaagtagcaccacggaaaccatcaccaattacattgtgaatcgccatgtctgctgtgaagcggctaccatcataaatgtttgatgtttcacggaaaggtgagtccgtaccacttacgtcatggtggtcacgtccaagtacaactggccctatctcgccacgattaatggcatcattaaaggctttagcgatttcagcgcggccttgtgcgtctgcataaagaatacgagcttgcgagccaacaacgagcttgttttgcttcgcatctttgatccacgtgatgttgtcttgcatttgctgttggatctcttcaggcgagtccgccatgattttatttaaaacgtctgcagcaatcgcatctgttttatcaagatcttctggtttacctgacgtacatacccagcggaacgggccaaaaccgtagtcaaaacacattgggccaagaatatcttgtacgtatgatgggtatttaaaatcaataccgttttcagccattacatcgccaccagcgcgtgatgcttctagcaagaacgcattaccgtaatcaaagaagtaagtgccttttgccgtgtgcttgttaacagcatcagcgtggcgtttaagtgtcgcttgtactttttctttaaatacttctggctcttcacgaattaaacgatttgactcttcatagctgatatcaaccgggtagtaaccgcctgaccatgggttatgaagtgaagtttggtctgaacctaagtgaatgaaaatatcttctgctaagaagctttcccatacatcaaccacgttcccgataaaggcaattgaaactacttcttcattttgctgagcagtacgtacacgctcaacaagctctggcatgttatcgattagctcatcaacccaaccttgttggtgacgcttaatagccgccttagggttaacctcagcacatacggttatacagttagcaatgttacccgctttaggctgcgcaccactcataccacctaaaccagcagttaagaagatcttaccttttggtgactcgcctttttcaagcactttacggaatgcattcattaccgtaatagttgttccgtgaacaataccttgtgggccaatatacataaatgaacccgcagtcatttgaccgtattgagttacacccagtgcattgaatttttcccaatcatccggttttgaatagttcgggatcatcataccgtttgtcacaaccacgcgcggtgcttccactgatgatgggaataaccccatagggtgaccagaatacatatgaagcgtttggtcttcttccatttcgcttaagtacttcatggttaataagtactgcgcccagttttggaataccgcaccgttaccaccgtaagtgataagctcttctgggtgctgtgctactgcgggatcaaggttgttgtcgatcattaacatgatagcggcagcttgttcgcatttagccgggtaatcgctgattgagcgcgctttaagttcatagttaggcttaaagcgatacatgtaaatacggccaaattgcttaagctcagcggcaaattcagcggctaagtcggtgtgccattctttagggaaataacgcaatgcgttacgaatagctaattgcttttcgtcagccgataaaatgtctttacgttttggagcacggtttgcatcacttggatacggttttggctctggcaatacgcttggaataccttgcttaatttgttcttgaaaagtcattatttgctccctaaatttactgtgaacgcttgcgatttaacaagtgcaaccatggcatcaatgtctggtttaagtaagcggtcttcttctagtttggcaactttactgcgaattaatgcaaagttttcttcaataatgtctgaacacttgttaggacgtctaaattcgattgcttgcgctgcatacatcaactcaatagcaaagattttatctaggttacctaaaatctggtttaacttacgaccagagatactccccatagatacgtgatcttcttggcccattgatgtcggtacgctgtctgctgatggcgggaaacacaatgacttattttctgtaaccagtgcagcggttacatattgcgggatcatcatgcctgaatttaagccacccgatgtggttaataagcgtggtaagccgtgtaaaccttcaagcaataaataacaacgacgatcagcaatgttaccaagctcagccgcagcaatagatgcataatctaaagccatagctaatggttgaccatgaaaaccaccacccgaaatcgcttcttcctcactaataacaattgggttatcagtcactgagttcatttctatctctgcaagctcttttaagtggtaatacgcattgcgtgacgcaccatgaacttgaggaatacaacgcagtgaataagggtcttgtacacgatcacaattggtatgtgaggccatattctcagaattagcaaaaaagctacgcatacgtgcggcaacttcaacgttacctttaaaagctcgaatagcgtgtaattcttcacggaacggtgattggctaccttgcataccttcaatgctcatagcgcctgcaatatctgcaaggtctaataagtaacgcattttagtaagcgctgtaatggcgtgcgataaaataaactgagtaccgttgattaacgcaagaccttctttagcgtgcagatcaagcggctctaagccatgctcttttaatacctctgccgcgggtttgattgtgtcgtttacccagaactcgccttcacctaaaagaggtaaaaataggtgtgataatggtgctaagtcacccgatgcgccaactgagccttgctctggtacaaccgggataatatctagttcaataaacttaagcatacgctcaacaacagttaagcgaatacctgaaaaaccttggcttaatgcatgtactttggtgattagcattaactttgaaataggcttagcaattggctctcccacaccaacagcgtgtgtgatcaataagttcttttgtaataggtttgtttcttgtggagaaatttgtgtatcacacagtggaccaaagcccgtattgataccataaatggctttatctgaggcagccattttatctacgttttggcggcttttattaattttatcaatggcttcttggcaaagctctgcctgtaacgtaccggctgcaatcgcattaacgttatctatcgttaattggtcaacaccatacttaaatgtcatttataactcctaaaaacaggattaagttttaattagtggcagtctagcttgctctagttgttttacaaatgcataattatcgttattcattccagatttatcgaactaaaagagccactatgcaagttcatgatgtagacctacgattattgcgtgtttttgtagcaattgttgagtgtggcgggctttcagccgcagagtcacgtttgaatattggccgctcaacgatcagtgcgcatttatcagatttagaagtaaggcttggtattaaattatgtaaacgtggccgcagtggttttgaaattacagatgcaggtgctattacctaccaagcatcaattgaactgcttcagcaatgcgaagcctttgctaataccgtcgcaagctctaaaaacgagctatcggggcgtttaagtattgctatgatagataccatggtaagtgaccctcgctgcgccattccccgcgcaattgcaaggttaaaaggcaaaggtaaaaacattcagtttgatattaacgtctgtgaagcccgtgaggtagaaaccgcagtagccaatggccgttcattagtgggtattggtgttagccgtcatcatattcgcggattagattacactgccctacataacgaaactaactttttgtattgtgcaaaaggtcacccactgtttgagtgtgaagacaaaaaaatcaatgagcttattaaagaagccgaagttattaccagtaactacatgcgcgataaagaaagtagaaacgatggcttaaactaccaaaacagtgcggtagcctaccatgatgaaggtatcgcacatttgattttatcgggtgagtttattggttatttacccgaccactatgctcagttctgggttgataaaggcatttttaaagctattcaaccaaacaaatatcactacgatattcctgttgtattaataacctctaaaacaaatgccaattcaccactcgcaagcgccatgatcaaagaaatcaaagactgctatggtgtttaattcacttattgctagtttcgctattcttgagctcgattattagtacagtactaaacgcgatcagtgcaagatttgtagtcaccggattgaatgcttctatcaatagtgctggttgtaaaaaagctacaaacagtattaaacctattaacgataaaatattgactatattgattaaaattgaacgatagaaaataaaaaacaacaccgcaaagacgatttcaccaaccccagcagctcgtgttatgagcattgaaatttcggcattaaaaccaaaactggctgtcatccgttgttcaagtggagagatatggataatttttgggaaaaggccatggtaaagccaagtaaagctaataataaaccgtgaaatttgcactgccgttagatttttcataataccctattaaacgtgttgtgtgttctttaaaagaacacacaacaaataagtattatactgttggttttccaaaacggttctcacctgcatcacctgctaggaaaccattttctatgagtgcccagatcccaccgattacaggaacaaaaccaattagtacccaccagcctgatttattacggtcatgccagcgtttaatttgaatagctagcgaacaccatataagtggcacatataagataagcataattatagagatagctgattcgctaccacccgaaagcaatgcgacaataaacattaaaacgaatgaagcagcaatcattcctagtactgaaaaccaataggttttgcgaggaatgcggccgttaaaagaaaatagtatttcttttacactaaggcttgttgtttctgttgaagttgatactacatttgattctggggcttgatatacgttttctgacactgtcatttcctttgaattgtgttttagtaaactactattatttgttagctcactgatttataacattaactaaactagtattagcaagaataagataacataaatttagttaatttgggtactaataaatttcttagctcttttttatgtaaccttttaccctaagttagtagcttacagagcataaaaaaagcaccatgaaggtgcttttaattaactcggttgttgccaatatttggcatataaatttggataggtttgttttaaatacttggctttatctttaaagcgtttaccttttggttgctcaaggccagatggaataaaaggtaactcgtcgtcattacgttcttcgtaaagcataccggcaattaaatcgtattcatctaaatacgggtaaggctgttcgtttaaatgataaaccggcgtacactctgcaattgagtctgggttttcaagcgcctttaaaaaagcctgttcaccacgtgaaataagccaacataaaaactcagagaaaccataatcgtcattacaaccggccattacataagcggcaccaaataagtcccaggtataggctttgcgcatacgtaggttaaactgcttatcaaattccatcagctgttcgtcagataaatcagccagctttgcttttaatgcattacaaaccgactcaggctcagcagttttatcttcggcggtcacgagttgccaaaattcactttcgcttaaaacactcatgataaaatctctttcacgcgccctacttgaccatcatcaagttgaactttaatgccatgcgggtgattcggtgatttagttaaaatacgtgacaccacgccttgagttaactgacctgttcgttgatcttgttttaatacaatgttgacttcgcagccaattgaaatttgtgaacgcgtaggcactgccattgcaaaatctctttcaataatttttgccgattatagctatttgcggctggcttaccaaattaaacctgtttgattgggctgtttttaagcagctcctttggcaatatctcatttaagcgtttaatgatagcatcagccttgcctttaatttgaaagtcgtaaccttggccgttgccatctaatatgacggctaaatagttatcagcaactttcagttgggtaatacggcttaattcaagtgtctcttctttatcaccataataaacctgcttaactgttaggcttgtgtctgttgtcgtgagtgttttactaagggctgttttggctgcgaacttttctgttgagcgacaggcctgcaccataaaaccgattgcaaatataaacccgttataagatacaatagtattcggttccgattgcacactatagacaccgaacccaacacatagcacagccagtgctaaatttagagtaactaacttttttgaggttaaattcatcattattcctttaaaaatgaaattgcttttgcattgatagctaagtctacagcgctcaattctttgataattagattggtaattaactgggtttgctcagcggttaacggcagttctttacaataacaacttacttttagtgattgcggtagcttttttagatcagcagtatgagttaaccatgaaaattcgtgtacctgatcttttgctagttcacacgcttgtgttaacgcaactcgaattgctttgtcttgacgtttttcagttttggtcatgttctgcttgttgttttttaaactcttcgtaactgtcctgctggcgctttacacactcgtgatactctttatcagccatataattgcattcacttaaacgtgccgattgaatttcatgataacgggcatctgagctacacgctgataaacacacagcaacagtcgcgattacggccaattttaaagcattaaaaaacatttaatttcctttatgtagttatacattggtgctgcattttcctgtatattgcgtgggtttaaatattattaccaaagggttctatatgatgttgtcgcagttacaacagctgtttcagcgtatcgataaaagtaaaatttttcaatcatttgttattgctgttattgttatttcggcattaacagtcggggcacacacctattcacttcatccaacggccgagcttgccttacattggatggacttaggcatcacggttttctttttagttgagctagtgatccgctttattgcaagccggggctttaaagatttcttcagcaaaggttggaacattttcgattttataatcgtagttggtagcctttaccctgcagctggttcaacaatttttatcgctcgattactgcgtattttccgcgtgttgcgacttgtatcaatgatcccagagcttagactgctggttaactcgcttttaaaagccattccacaaatgggctatatcgccctactcatgtttgtgatcttctatatttatgccgctatgggtagcatgttgtttgctgacattaacccggtattatggggcgatgtatctatttctatgctcaccctgttcagaattgccacgtttgaagattggactgatgttatgtatgaaactatggctgtatatgagctcagctggattttctatctaacgttcatcttcttaacagcctttgtatttctaaacatgatggttggtgcaattttagaagttatgtctgaagagcatcgcaacgcccgcgaagagcaaacctctgatgccgacatgccagctaccaaagggcaaattgctcagctacaagctgaaatggccgaactaaaacaattactgaaagaaaagcagtaaggtttttagagcttactttttagataatagcttttagatattaggcgctaggggcaagaccttagcgccttttttatcctcgtttttctaccttccatggtgggtttaagcggttctctcctgcccaatacaatttaattttattccctgatgggtcttttagaattgcttccgtccataaatagcgctgggcggttggtggatgttcaaaactaatgcctttttcaacaaggcttgcataaagctcatcgagctgctcatgttcaaaataaatgaccgcatcattactaaactcttcagtttctaatgacagcgaaaatgtggcatcaccatctgggcattgaaagcgtgcgtaatgcggggtatccacaatctgaatcattcccagtgttaagtaaaaggccaccgcttcgttcatatcctttacaggtaacgtcacctgattgagattcatttgtcactccaatgtaatgctttattcgttgcttcagcatatcgcgtacagctaattaagcaaaagataagctgtaacaaattattgagttaaacataagaagcaggagcataattgcaggttcattttacaaaatgaacattttagatacacgcccaaaatccatatcgggcgtaaggttttatcctgtatgatcaacaactaagtatttagtgaagcccaacattgtgtattttcgtgcttaccttgctgattattgagctcgcttagaagctctgctaatgataaagatttataaaagtaccaaccctgaaccaagtaccctttattatatttcctaatgaaactatattgttcaacagtctctacaccttcaaaaataacgattcgatttaaattagttaccagtgatatgatagctacaatcatattttgcttttcatcatccatgattgactgtatgaacaccttatcaatttttatcacatcaaagttaatctctgttagccagacaaggttagacactccagtaccaaagtcatctaatgctattttaaagccataagttttggcttttaaggcaaaacaagagatctcttgcaaaggcaggccaattcgttcagtgatctctattcttatttgctcatgatttacttcatgcttgcaacataacttatgcaaatagtccaagaactcaggttcttgtatttcatagctattgacatttatcgctactgaaaaacgacgatcagtgttcataagctgacccagctctgcaatcatttttgtcaaacattgctttgctaatataggataaagagataattgctcggcgagttccaaaaattgctcaggtgagacttgcccatgaatagagtctttccagcgcactaaactttcaacgctagtaattttattagttttaacatctactattggttgatactcaaggtatatttccctttttctaattgccctttttaatctgaactctattgaacgtcgcaaatctaagtatgaaattaaagaatatataaataagaaactgataatagtaagcaagcaaataagaagaacagaaatataagggggaaagcccattaggcctgttttattcttttccttaatattatttccatatttaaaaccataactgcatggttcaagtactttagaaggttcgcgcctattatccgaaacctgaggcagcccttcttgcttagcaaataacactaagtctgttaggttacttaaaacaagaagcaaattgttgcttcttttattgattccaagccactttttaatgtgattgtttgtatctgattcgtttagttgtaaatagctataaacatgaccaagcctatagctatccctaaaaatcaatgatataccacctttatcttttactaatttagaaagcaccgagctccccgctttaaaaataaagcgtatttggtttacctgaggaattacatatacagcatttttggttggttttttacgcaaaggccgattatcttcatttgctggcctcggcgattcatgcatgttgactaggtcagtaattgactcaaaattatatttgaacgccaacaaggtgcacagtgcagttcccgccagtaaaaccaaaagcaaaatacagccgtttttattcatcgctgctattgatagattaaacatgcgtcacctctgcaagtcatgcggatcaagtccgtcttttgcgagctgtgttgcaataataaatatcagctgattaatactatcaatttcttttgttacacctactagaaattgattactgtaaattcttaaattggcggtagttttattagctagtttagagattaaacttaaataaatttgcactgttctgcaaactgataaaggctctgctaaaacaatattctgatgattatttttttgatacacaagacctacgcacagcagtgcgtaacgtataaaattacttaaatacatatagttactcttacttaaattagactaagcttgaaagcgaatataaaaggttagtgttatgtaagagatgttattggtgggcgatgaatgggtgttaaatcggcagattgaaaatcgacactcaatgactcaatcttagtaaaatacgctgatatcggctttgaaaatactaatgattcaacaaaagctggactatgacaaacatgacaatggcctttctcggcagattcagctaattttgttgcaagttcagcatgctcagattggtgtagttgatgatcgccattagcagcgcaatgagtttcaagatcgacttcctctaacaaaagtactgatgtgtaattaaatgcagtgttgtgatctgcaacatcaaaactgtccagcaaaggctggagtagtaatacacaaatcaacatagagaaaactgatttcacacaaaactcaggtatcgggacaacagccttaaactaacaaattagtcttgttttgaacagtgaattttaactataaaatacagcttaccttagttctaaagtctctttattttaagtgcattcaatttcaataagttaatattaaacaaattggaaacatgccccataatggtatagcaactccgccaaatacctagcaatacaagctgtaacacatagtgtgttcattctatctatgtcttatagattagactcacagggtgttttaagtctcatatgcaatattggaaaaggcttgcccatatcatctaaaggtgagcgtgagataactttaaaccccatatgttgataaaacccaactgcaagtgggttttgctcattaacatccactgtgttggctgctaattgctcaaccgcatagttcaaaagtgctttaccaatccccatacctcttgcggcatttaaaataaacaacatttctattttgcattcatgtacgcctataaagcctaaaattgcctgatgctcatccttaatgcactttaaagttacgttgggaaaagcttgctcgataataattggcttaaaaaaggctatgtcgtcttcagttataaaatcatgggtcgctcgtactgagttttcccacacatcaagtagctctggataatcatcagagttcacactttctattttcactgtaatccttttttatcatcaagtactttatgtagttcggttaatgataaagacttataaaagtaccaaccttggacttgatgatcagaattatattcttttataaagctgtattcttcaaccgtctcaacaccttcaaaaatgaccagacgatttagatttgaaaccagagacatgatggccaataccatatcctttttgaattcatctgtgatcgattgggtaagtattttatcaattttaatgatatcgaagttaatctctgtcagccaaacaaggttagataccccggttccaaaatcatcaagtgctatgacgaagccaaaatcttttgcccttgtcgcaaaatcagataactcttttagaggcaaacctatacgctccgttatttcaattttaacttgctgaggttttatttgatacctatcacaaagcttattcaagcggtctaaatattctggagtctgaatttcataagcatttacattaatggcaactgtgaattctgggtcacgatgcaaaatcggggaaagctctataaatgcacgtttaactgagtcatatgccaactttgagtacaaacttaactgctctgcaatacttaaaaatagttcaggtgatacgtttccatgaaccgcgtctttccacctaaccaagctctcaacaccgacaattttacaattttttaattcaataattggttgatactctaaatataaatcgccgctttgaatggccttacgcagcctaaactcgattgaatgattcttatctaaaaatgaaataatagagtaagcaattaaaaagctgactaacccgatcaaacaaataagtaatgcagatacgtacagaggtaaataaagtaatccaggacgattattcgttgtttcaacacagtattgaaactttttactacatatttctaatacctgagatttcaaaaaagtattgttttttaattggtactgcgacgagtaattatgaaaagtatgctgcttattttttgacacaattttataagaaaaccccttatctaaatgatcaaaactcttaaatggctcattgattgtaaaagcaataacgttatctttttttgtaatgtcatatttagccggaacagggaaaataccaccaactttagcagcaaattgataaccagaaggtgaatgataaaaaaccccttcaagtaaaaaaggagcgtctaataatccccagttagctgaacacaaaaccctatcatcaaaaatcaatcctaaatcatgggtgtattcatattttgaaagaattatacgaagttcgtttattgtcgttgcatcacactgactcggggatatagcagaaacatctcgcatcgaagccgctaaatcactcgatatgctttctgcttttaataataaagaattggcaaactgtttttggtaatttagttgtagataactaacaatgaggtgaaaggaaaagataaaaaaaaccatgataaaaactatatagatagtttgtttattattgtttgtctttaatgtttttcctttcatgcgtaacttatcttttagttatattattacaaaaactaaaccttaattaccattaaatcaacaaattccaataaaaaaggaacagaaaatctgttcctgatatagaaaatgcattttgacccaattttaactacaccttaaacttaccgactaggtcggtaagtagatgagatagctgattcaaccgctcgccattttcacgcgctccctgtgcaatatcactaacatcgtcagcggcgtttttaatttctacaacattacgattaatatcttcagctacgtgctgttgttcttcggctgcggtcgctatttgtgtgtttaaatcacttatattaacgattgaagcagtaatttcgctaaattgctgctgtgcagaatgcgccaactcaactgttttatttgtgcggttcaagctggttgtcatttctttagaaacctgatcagacatcttgcgcaacgtatcgagttgacttgctatttcttctgttgactctgatgttctttgcgatagcgctcggacctcgtctgcaacaacagcaaatcctcgaccatggtcaccggcacgtgcagcctcaatagcagcatttagcgctaataaattagtttgttcagcaatgccacgtataacactgagaatcgacatgatattttcactttcagcatcgagttggtttatatcttgagttgctttggtgatcacttctgacaaagatacaacgctatcaaccgtctcagtaataacactttgtccaagttcagaggcttgttgagtttgcgaagcaagttcggctgcatttgcacaactggcagaaacctcatttgctgttgccgccatttcattaatagctgttgccgccatttcaagagcttgctgttgttgagatgttgaacccgataattgagaagcttgtgacgaggtgtgtgcagaagtctcactaacattctgtgcgcagtcattaatttgcttaaccaagtccgatatcaagtttaaaaataaattaaagctgtttgctagttttgctgtttcatcgcgtgttttaataactaaacgcttagttaaatcacctccaccttgggatatctccgtaaggccatcacttacctcaacaattggtgcagaaattaatttagaaatatagctagcaacaagaatgaatacagcaatcagaattgcactgatgactaaaatggtaatagtcgttgcgtttgctgcactcattacttcagatttttcaactagaccgataaatttccagcctagcttttgcgaagtataaatattagccaagtaatctttgccattaatgtctatttcaaactgaccatgattgttattggcaagctgtttgtatttaccattatcaatctggcttaattgtttaaaccgataatcagcatttttaacatcaaccagcacattgccgctatcttcaatcagcattagatagccggtttcaccaagtttaatgttagcaataatatctgtaaggccctgcaaagagacgtccatgccctgtacgccaataaactcaccagcttgtttaatggcttttactgtggacactataaccatatcatctgccgcccaataataggcattggttcttactgttttaccatttgctgctttacccgttttataccaaggcctaactcttgggtcataatttgctgtcacttcaccctctggccattgaatataaccaccttgctcgttccccatgtagatgtaagcaaggcctggatgggttttgccaaaatgatcaaataagttaaaggcggttttttctgtgttactgccattgacgtgatcaagtttcactgaattaggcgattgcatgtgggttttaacgccttgctcggcgtctaaaatagcggaatgagaagcaagataatcgacgtttttctctatttcgtcaaaaaacatactaatgccgttatcgacttgtctcgcctctcgttcgcttagttcagcgaaattatctaatgcctgctgtcttaattgagtaatgactaaaacggcaataattataagaggaagcgcaatggccgatgcaaaagataactttaattttttagaaatgttcatggagagttctcagctaggtacttaagaaaatatagttaatcacttaactttcagcaagctatttaacttacattcaatacaactaaaccaccattgatagattaataaaataagcaataagaattgatatgtacctacactttatattgacacaaacttgtaatgtactaactttaaatattgtgattaacacgattttaacaacaatggacttagcggtttccaaccaattggcagcatttgcaggaagcaaaattgctgcctattcttctcttgatttaataaacagcagtgcagtttagatagtattaaaacaacttagcgtagtaagtcttactgaatcgataaatcagctagcgtctaaattgcctatccctaccccatatttaagcatatagctaagtaaagcctgagcatctgggtgtttatctgcttttaaccctgttacaacaccttgttgatcttcatccgatttatgctggcctaacttctcttttgcctgaattgagtcaagttcaattttaatacccactatgccacgtagtaactttgcttggtaatcggctggcaacaaactagtgtcgtttaaaatactcggctcgtattggctaattagctcatcgaggcatgctaaggtgttgtcatcatcgaggtactctactttccccatggcatgaaccgaagcgtagttccaagtcgatacagcaggtttttctgcataccaagtgggtgaaatataactatgcgggccattaaaaaccactaatacacgcgtatcttgcaagcttttgccatgacgattcgctcgtgacacatgaccatataaagtgcccaactcgccttcatcaggtttataaactaaaggcaaatgtgttgcctcaaactcactatcaaccatcaatgcaaagctgtagtttttgataaactgcgacactcgctctggtgtcattttccatttattgggggtgtgcattactttcctttagtgctaaaaaaggccagcaaactgctagccttaatattgaaatgtgtaattaatgttggccatcaacaataatgcgtaacatgcgacgaagtggctctgcagcaccccataacaattggtcaccaaccgtaaacgcactgatatattcagggcccatcgctaatttacgaatgcgacctaccggaatagacaaggtgccggttacttttacaggtgttaagtctgttgcagtaatgtcacgatcattcgggatcactttcacccactcgttgtgagaggcaaggatctcttcaattttctcaacactaatatctttgcgtagcttaattgtcattgcttgcgaatgacaacgcattgcaccaatgcgcacacataaaccatcaacagggataggctgctggctgctacctaaaattttgttcgcttctacctgcgctttccactcttctttactctgaccgcttggcattggtacatcaatccaagggataaggctaccggctaaaggcacaccaaactgatcttgtggtaaatcgcttgaggcaattttttcggtaactaatttatcaatttcaagaatcgcagcattaggatcagtaagtttgtctgccactgtttcgtgaattgcacccatttgcgcaattaactctttcatgttgcgtgcaccagcacctgaagcggcttgatatgtcattgggctaacccactcaatcaagtcttgttcaaataaaccgcctagcgctagcagcatcaatgatacagtacagttaccacccacataggttttaacaccttgctctaagccttgatcaatcacgtctttattgactggatcaagaacaataatgctatcgtcactcatacgcagtgccgatgctgcgtcaatccagtaaccttgccaacctgattcgcgtaattgcgggtaaacggctttggtatagtcaccgccttggcaagtgacaataatgtccatcttcgcaagctcagcgatatcattagcatctaaaagcggtttagcaggacccgcaagatcagggcctaattgaccggtttgtgaggtggtgaaaaaagtggtgtcgattttagaaaaatcattttcttgttgcatacgttctaataacacagagccaaccatgccccgccatccgactaatcctacttttttcattgtttgttccactgtttgattcattccaattacctaaactgttaaaaattaaagtccattgcgtgagagtttaatttttacagggataatctagcattgcggccaaagcaaaaccagcgcaaaccgagtaacatcaaaatttttcatcatcgtattagcggacaagcatctggtagcaccatgtttagcgcaccagcatgcacttcaaaacgttgttgttttgaagtgattggctcgccatctaagtttattggcatttctgtttgtgtttgccattcaagccatggcacttgaaaacgttttacccactgttgtgatgaattaggataattgctgagctcttctataaccgctggtacatctgaaattgcaaatgatgtaaacgcaactaaatcaaccaagccatcgtttatgtatgcatgtggtgaaagttgctgaccaccacctgcttggcggccgttacacacggctgcagcaataatatcgcccgaagttcgctcaccatcagggagggtaagctcgccactgtaaggtacaaagctcagcgcttgaacaagccctgccaaggtatatgcgccaccaccgagtaagtttttcagtgcaggtggtgtggttgcggtaatttttgccccaaagcccgcactggctacgtttacaaaataacgcttatcaacctcaactgtatcaattgcatacggctgaccctgtgcggcaagttcaagtgctggcaagtacccgtcaggaatcttagcggctgtggcaaaatcatttgccgtgcccataggtaaaatagcaagctctaaacgctgtgatttttccattttcattaatgcattaacggcttcattaacggtgccatcaccaccagctacgacaatacgtttcacgccttcgtcagcggcctcattaataaagcgctcaatgtcacccccttcataggtaacacgcacagcaagagactgactggctcgaaattgactaattgcttcacgaagctgctcatcagccgcttttttgccatttaaaattaatcgtaagtccatttttaatccctgtttaacacttagaactaccataacacgcaatggtttaatatacccaaactacctcaagatgcgagtttcagttggaattaaaagcgatttaggcaaggcattgattgcaagtaatagtggttctattgttaaaatcaataacgcagtataaatcgcttttaaaccaaccctttgggcgcttcacaggcacttactctcatcgttgttacttcttaaaagggactgccattcttgcaaagtaacgccttgatattaagcacctgtgaaacgctgaattctgcatcttgaggtggtttgggtatagaaacaaaaaagccctgctagtgcagggctaaatcaacgttaggatttattattgtatccttccttggggagtttaattaaaactcgtagctgaagcctaagctaaacttagtgccttcttctttcttccaaagcgataaaccttcttgttcaatttctttatcttgaccaaggatgttttcaattttgaacttaacttttgtgttgaagttcgggaagtaagagtaaactagatcaagcgaatggaatggcttctcttctgcatcttcattaccgcgagtacccggtacaataatacgcggaccaaacacgttatatacaagcgatgtcgagtggaaaccatcagcagagtcataacccatctgtaagtttgctacccactcagagtgacctactaaacggcgctcatcattagtgacaatgttagacacggtatcggcatcaagtgcatcttttaattgctgctcaaacaacgaatcaacgccgtcagaatcatcaatacctagtttcacacttgagtcagatagcgtaacgttacccgacaagaacacactcgaccaatcggcactgataaaactaaaatcagtcaagaaatcaacttcaatacctgttaactcacccgattcagcgtttgcagttaatagctgtggcgcagcaccacctacacctgcaagctctaccatttcgatagggtttgtaatgtctttgtagaacaatgcaactgataagttattgcccgatgccatataccattcaaaacggaaatcagcatttttaagttttgagctttgtaatgtcggtgaaccacgaactagaaattcagttaacggatcaacgaagaacgttgagcttacatcacgcatatctggacgaatggttgtttcgcttaaatttaaacgaaattgcatttcttcatccataatataagtcacagctaaagatggatagaaatcatcttctttaattgctacttcagctagctcttctgttgtcgcatcaaataaattactgtgagccttaaatggaaccgatacttgggcaaaatcttcccagcgaacaccaccagtaatacgccaagtattattgatgaaataatcagccataaagtaataagcatctaacttatgcgccgcactgtatttatcaccgtctgttgttctgtcatcaaaaatgccagaaccggttgaacttgcgtaaaaagcatcattgttgatgttatcgtaagcgaaaatttcatctaaacgtgagccataggtaaaatcatcagcaataccacggtgcgtaataccaaatgtcgtattatttgcagtacgtgttttctctgagaaatcgccacccacttttagttcaagctcatagccttcaccataaaatggcatgcccatgttccaaccccaagtatcaacttcatcatgaagaacttggaattcacgggttacgttagtagctgaaacatcttgtaattgctcagaaacaaacgaaccatcgtcgtagttacgttggaaaacagcatctacaccacctggtgcatcacgatttgcacgacttgtgccggcataccaatcaacaaacaagttgttaaagtcgataaagttgtgtgtgccttttaattggctagagaacatttcacgctcttcgtacacaacatcaacgcgacgaagatcacgtacaccttcttcagtttcgttggcatcatagaaattacgattacgaacacggtcacgcatgtcatgcagtgcaatgtttgtcatctcaattttatggtttgaattaaactcataaccaatattgaatgtaccactccaacgcacattttgttccgttgatgtgccatcgtaatactgagcaaaacacttgtcttcacaacctaagctgccaaggttagtaccacttttttcttgtgctacttcccactcattttcgtaagaaacagcggcaagtacaccaaacgtacccatttcactttcaaagcggtcgcctagcgacactgaaaagctcatttcaggatcaacgtctttttctgttgccgaaatattccaatcaagtgacgacatcaatgcttggcgctcagccaatgttgtattgatatcaccttctaggccagtgccataaaaggcattaattatttcagtaggtaacgcacgagtaccatcatcacggcccatccagtcatcatcgccaccttcataaaagtagcctgtatcactgttattggtattgtaagaagtaccaatgtcgactttaaacaaaaaatcagtcgggattgattttgttctaatatttacgttaccaccaccaaaatgcgcaggcatatcgggtgaaaacgatttttgaacgcttaaactttcaataatatctgatgggaataagtcaagcggtacaactgagcgagttggatctggacttggcacatacatactattgagctgagtactcgaatatcgctcacctaaaccacgaacataaatgaacttgccatcaaccagtgtcaaacctgttacacgacgaagtgccgatgcagcatcgccatcaccagtacgagaaatttgctctgcacccatgatatcagcaacaaacgcttgattttgacgctcttgaagaaccgcgccagcactcccttttaaacgctgtcctacagcaaccacttcttcaatttcttgtgcttcatccgctgcgtaggcagtattcatcgataagcctactaatgctgcaagcactgcgtgatttatctttgaacgcacaagtttagagggggtaaaagatttcattattatactccgaaaacaaaactagaagctggccgggggattcccccgaccatggattagaagggcttagttaagacctacttttacccaacctgctgtccagtctgtttgcgcgtccattgcaccgatgtaatctactttatcgaagaagctatttaggcttgaagaatcgaaaccactaccaagtagtgctgattctgcacttggttgataaccgttgtcgctaagacctaacatagctgcgtccatgatagagttaccttcttggccttcgaaccaagattgaacattacccgtaccaattgcttgacttgagaagttattatctgctgtacatgcaactactgagtggctgattgttagtgaaccatcttcagcgcgaggagctgaatctgcacccactcgtaagcagtttttgtaaccttcaccacctgttactactacgtttttcagcatacccgcagtaccagcacgtaaacggataccgtttacaccatctgcaccgatgatagttacgttagagatagtaggtgtagttaaaggtgatgcatttgagtcaaactctgagttatcagcttcaattgcattatcaccttctgaagaagactgcttgattaatacatattgtgcattaccagtccaaccgaatgaccaatctagcgagtcatcaccgatgtttgttagtactaagtggctgatgcttgcagtaccaccgaagaactcaacaccgtcatccagattttcgtgaacgtggatataatcaagttcagtttggctaccaacacctgcaagtgaaataccgttaagctcatcaccgttaccaagtgttttacctgcttgttttacaacaacatacttaagtgtacctgagttatcttctggttgattaccaccgaattgaccagcatcaccttctgcagcaacaccacagtttgcaagttcatcggctgttgtttcacccacttggtcaccacaagagttagctggtgcgttaccaagaagtaccacaccaccccattgaccaatgcctgtttcagcacctgtcatatcttggattgatgtcatcacgattggttgagttgcagtacctaccgcttcaatcttagaatcacgacgaacaactaagaagtcatcaccgctttcaccgattagcgttgtaccaaattgaacataaagagtagcactatcagtgcggtcaccacccactgctgtacgacctttaaggatccagtgagcatcgttagttagagttacgtcagatgtgaaaacaacatcttgtgctaactgatacactggcttatcggtaatttgtgggaagcttgcagaaacatcagtcgctagaccttgttccattgcgtttgtgatatctgtagggaagctagggttaacagcaactgtccaaccttccatccagttattgtcaccgtcaaatgcaccaatgtagcttgttttagtgaagaatgggtcaagctctgacgcatcaacacctgcacctaatagcggcgagcttgatttaggtgtgaaaccatctgtagcaaggtttaatgtcgctgcagttagcgtttggttaccagtttgaccttcgaaccaagattgaacattaccagaaccaattgcttcagtaccgaagttattctctgcactacatgctaccactgagttttcgatagaaagctcaccagactcagcatttgcaacagagtcagaacctacacgtaaacagtttttgtaaccttctgggcctgtgataaccatgttacggataacacccgctgtacctgcgcgaagacgaacaccgtttttaccgtcagcaccaacaatcgttacgttagaaagtaatggcttagttaatggtgtagcgtttgaatcgaattctgagttatcagcttcgattgcattgtcaccttcaactgatgattgttggatatatacgttttgtgcacgacctgtccaaccaaatgaccagtcaaacgcgtcatcaccaatatcagttagtacaacgttacgaacgtttacagtaccaccgaagaactcgataccatcgtcaaggttttggtgaacttggatgtattcaacttttgttttagaaccaacaccggcgaatgagataccatttagctcatcgccgttacctaatgttttacctgcgtgtttaacaacaacataacggataacacctgagttgtcttctgcatcgtcaccaccaaattgacctgcatcaccttcagctgcaacaccacagtttgctagctcttcaggtgttgtttcgccttgttggtcaccacatgagttagccggtgcattaccaagtaatactaaaccaccccattgaccgatgcctgtttctgcacctgtcatatcttggatagatgtcatagtaattggtgctgttgcattaccattagcattgatttgtgaaccacgacgaacaactaagaagtcatcacctgtttcaccgattaatgtagtacctgcttgaacatataatgttgcgctatcagtacggtcaccacccactgctgtacggccgtttaagatccagtgagcgtcatttgttaatgttacatctgctgtgaaggttgtatcttcagctaaacgataaacaggcttgtcagtgatttgtgggaattcagatgaaacgtctgttgcaagaccttgcgccattgcattttcgatatcagttgggaagccaccattgatagcaacagtccaaccttccatccagttgtttgttgcgctaaatgcaccgatttgaccatttgctaataatggtgaaccagctaaaggcatataaccattatcatctagcattaaatcagccggtgttagagtttggttaccatcttggccttcaaaccatgcttttacagtaccgccattaatggtttcactaccgaagttattagcaggtgtttgacaagcaacaatagagttagtgatagtgagtgaaccatcttcagcgcgaggaactgaatcagaaccaacacgtaaacagttttcatacgttgcagggcctgtaatgaaaacgtttttcagcatacctgcagtacctgcacgtagacgaataccattgttaccttcagcacccacgattgttacgttttcaattgtagggttagtcagtggtgtagcgtctgaatcaaactcagagttatccgcttcaatcgcgttgtcacctaagttcgcagcttgttgaatgtatacgtttttagcagtaccagtccaaccaaatgaccaatctagtgagtcatcaccaatgcttgtaagtaccacgttgcttacgtttactgtacctccaaagaactcaataccatcatctaagttttcgtgtacttgaatgtaatcaactgtcgttgctgaaccaacacctgcaaatgaaataccgtttaattcgtcaccattacccagtgttttacctgcatgtttaacaactaagtatttcaatgtacctgagttatcatctgcaacattaccaccgaactggcctgcatcaccttctgctgcaacaccacagtttgcaagttcgtctgccgttgcttcgccttgttggtcaccacatgagtttgctggagcattaccaagaagaactaaaccaccccactgaccgatagacgtttcaacattagtcacatcttgaatcgaagtcattgtgattggctggcttacagtacctaccgattcgatttgtgaaccacgacgaacaactaagaagtcgtcacccgattcgccaattaatgtagtaccttgttggatgtaaagaacagcattatctgcacgatcgttaccaaccgctgtgcgaccatttaaaatccagtgagcgtcatttgttaacgttacatctgcagtaaaagtagtatctgctttcaaacggtaaactggcttatcagtgatcgttgggaattctgaagaaacatctgtcgctaaaccttgtgttaaggcattttcgatgtcagttggaaaacctgtagtcgcattttgagaatcatcacgacctgactgatcgccgccgttatcaccattgtcaccaccgttatcgatgatattagtgatgttatcgccttcatttacagtggtgtcgccttctttaacgactaaatcaccaccacaaccagctaaagaaactgcagcagctaccagactaactttaaataagtcagataatttcattgttcactccgttaagatagatatttaattattgtgttagcgcataaactcaagtcaccaaaaagcactgaaacttaatgcttttgggtcacttgagttttaaactgcgactaccttacgggagctgtatgacaaactagttacactttaataaacataaaatgacaatattaattatttaaaaaagagtaagttagttaattttagaaacggaaaaaagccgcccgaaggcagctttggtgttgcgattataaattagttcttttgtacgcttacctgttgaatacgatttagagtaaagcggtacgtaatgtttcggcgtgcactttttcacgcttcacatacttgatccattgctcagctaaacgctgtgactttttgtgcttttccgcttgctcaaacgctaaaatcgaggcatcaaagttttgtaaattgtactgcgccatacctaaggcaacatacacatttgattcaaactctaatccgcctttatcgagcgctttacgcgctgcatccgctgcttcttcgtatttttcaaggttgatactcacctcggcaatacgttgatcgtactggccatgagttactaaatcagctgcttttgcaaagtattgcagcgacttttcgtcttctttagcttgcaccattgcttctgcaacaaaggcgtagttttttgctgatttttcagccacaccatcttgtattgctttactcatcactttcgcagctttaaaagccaggccgttgtataaatacacttgtgataattgacgtaaatctgatttagatttcatgaaaccttgttgataggccgcttctaaaatcgctaattgctttttctctgcgcccgtttcaccgtacatgccacctaactgaacccagtactctggcttgttataaagcttcactaagcgttcaagtacctcgaccactttgtcagactgattaagtgagtagtacatagcacgctgtaagattaaccagttttcttttggcatttcgcctttactgtcggcttctgcgatagcaaggttaatgttttcaatgcctttttggtactctttaagctgataataagcttgtgatttcaatacgtaataagcatctgttttaggcttgtcgttgatcgcatcccactgtgctaaatatttgattaccttttcgtaatcgctattagccatggcaagttgcgctaggctaaaggtggtgcttactcgtaatgtttctgggatcgcgtcttcgtttactactttttcaaacgacgcaattgctttatctaagtcgttttcgttgtaataaataaaaccgtagaaattatgcatcatggcaatttcatacgagttcatgcttgaagagcgctcttgaatactatcaagtgcttctagccctgcttttgcatctccatcatcagccagcttttgtgctcgtgctaattggctatacactttttcacgcagtgcaggtactcgtttggttttttgttcctcagcgtaagctgttgccagtgtaacacctggtaacatgctaacaacgcttgggactactaggctgcttgtgaaagcagccgcgcaaatcacggcaacttttaaaggtttcataatcgcattcctcttttctaaccgttaatctggaaagaaattttgttctgtacgcccgctacttcaacagcttcaccgttaacaacgcgcggtttatatttaaatttaagtgctgcatccatcgcagcgcggtcaaacaatgactcaggttcagctttaatcacttttgggtcacgtactgtgccttgcttagttactgtaaactcaacaatcacatagccttcgattccacgtgataaagctcggcgcggataaacaggcgctacttttacaatcggtaggtattcaccgtcgcttgattcaagcgctaaccccccggataagttaacgtcggcttcaacactggcaccaaagtcaaaattggcattgctcgcgttaggatcactgttttgcatttgcggtgattccattggcggaggtggctcttttggcgttggtggcttttgcggtttgcgttctttcttttgtactgtctcttcttttttcagacgaacaaaatcaagtacgtttccttttacgggctcagacatggccccttcaccaccggtgatcagtgcctgcatgcctaaaaacagcatgacagtcacgatacccgcgatgattaatgcaactatataacgcatcgctcacattccttatgatgcttcttgcgcagcaatcgacacatcaaatgcgcctgcagctcgcgatgcatccattactttgataagtacatcggttgtggcttttttatcagcttgaataaccacgctaccttgtgggttttctgcttttaagcgctcgatatttgcttgtactgcacgaacatcgacttggcgtttgttgatccaaatttcacctttgtcagaaatagcaactaagatgttggcacgctcttttttaactgccgttgccgcttcagggcggtttacatcaataccggcttcttttacgaatgatgctgttacgataaagaagataagcatgatgaaaacaacgtctagcattggcgtcatgttgatttcttctgcgtcgtcttcttgaaataagttacctagtggcgctctcattgttagtctcctagtgggtgatgcttacatcaccctaaaattcgtttagtggtctaagaccatgttgtcttcaagtaattgcacttcgcgttttgcacgacgctgtaaaaacgttgatgcgaatacccctgaaagtgcacccaccataccggccattgttgggatagtggctttagacacccctgatgccatcgaacgtgcactgcctgtgcctgtgattgccattacatcaaatacttcgatcatgccggttacggtacctaacagacctaaaagtggacataacgcaaccattacgttaattagcgcaaggttattatttagttgcatgccagcgcgtgaaatcatcgcttggcgaatttgctctgcgttccagctgttacgctctgctctattgctccaagtgctttttacgtctttcttgtagcgtttaaagccaccaaagaagtacataaaacgctcaagtatcaataaccacatcgcgaagatgaggaccccgatgaccaagagaacttggccacctgtgtcgaggaaatcacgtagagcattgattgcatcaatcaatagcaccatgatttatgctcctttctcgcttcgctctgcgatgatacctgcgctttgctcttgtaaaatcaacagcatgtttttagaacgcgtgttaagaagtgtgtataagaatactgttgggatagccacaaccagaccaagtaccgttgttacaagtgcctgagaaataccacccgccattagtttagggtcacctgtaccgaacaatgtaattgcttggaaggtgttaatcataccggttaccgtacctagtagaccaagtaatggtgctactacagagataatcttaattagcgtcaggttacgggtaatttttggcatttcacgaatgattgcttcgcttaatttaagctcaagtgtgtcgtacgcaacatctgggtactgatctttcactttcattacacgaccaagtgggttgtcatcacgtgccactgtgtctttaagctgacgacggattttgctacccataatcatcagggatacaaaacgctcaagtgcaattagtaaagcgattaaaccaacacctaaaatgatgtaaccaaccgtaccaccttggtgaacttgctcttcagtatctggtgcttgtactaaaagacctaaaattgaaccacctgtagggtcaagtgcgaacggtacaacacctgaatttgcttgttgtaagtcagctgcagttgcggtgtaacggctgcttggctgacgagttagctggctgattgtatttgtagccggtgtgtactctaggtacttaccatctgcgattaagttaaatgcaccaacacgtactacttctttttgtgctttgctgccaccttcaacgataacatctgttgtaaagcgagatactttaccttgttcagtcatttcgcgttgtaattcaaaccatactttttcgatatcatcgattgaagcaagctttgacgttgaacccattttttgtgctagctcatccatgaagttactacgaccaggaagctctgcagaaacaactgacgtcatgaatttattgcttgaatcgcccgctacttgttgtaacacaccgaatagctctttaagtgaacccatacggtttgaaagcgtgtctgttaagttagctagctttacttcgttttcttcaaactgagtttctaaacgctcagactcgttaagcattgcagtacgttttgcatgtgtatctttaagcatttgtacttgttcgttttgacgggccatgaactcttgttcacgttgcttattctcagcgctttgttgtgctttaccttgctctaatgtttttagtaatgagtctaaatccattggctcagccgctaggctgctaccagcaaaaccaaggccagctgcaaacacggccatttttgtcattttcgttaataatttcatctcaaacctcttattcagcagcgtggactggcagtgttaacatatctggggcaagttgcttacgtgcaatgcgtaaacctttgttgatttggctgattgcagaatctggtaattcaacaaacgattttgtttctttatcccagctacctgcttttttgccatcgcgtgttaaataaataagttctaaacgaccaatacgtaagaaatccacttcgcgctcttggccatctacattaagtaatgctgtgtacgcttcgatagtgcgaccgtaatcaacttctacttggtaagcttcaagtaagcggcggaatttttcacttgaagtgatgtctgcgcggtccatcatttcttttaatgatgcaatacgcttgctacgttcttcagttaagaaaggcacgtctagtgcaacgaattgctcaagacctgtgatcatgcgcatcattaacggcgtaatttgacgctcaataactgatacctgatccattgactcgtttaacgcgtccatttcagcaatttggttgtttaattgcttagtaagttgcgcgttataaacagttaagccgtcaatttctttattaagggctttgaattgttgtaaacgaccttgcattgaatctgcaatcttgtcgattttagtttgtgattgcgctgcagatttgtttatctcgctgcttttatcaattactttatctagatcgtttgcatgtactgctgcagatgccgctacaatacttgctaaaatcagtggtttaacgcctttcatcgcatacacctttactcgttaagttagcttaatttgctagttgggttgttttattgtgcgaaaggataacgatgaaaaatgacaagcatgttgcgcaaaaaatacaaaaatatgacagctgtaacaattagtttatattgggcaagaataaggcaaaagttgcagggtttcgggaactaaatataggataggatttgctgataagtgctttgccagtcttgataattaacaggtatagcagcgtataggcctttattttcaaggactaaagacggaaagccttgaatgggtaagcttctggcttggtttatttcggccataagcaatgaatttattttttcactttcaatttctttaatgaatgcatttttttctaacccaatttgctctgcaaggcttacaagggtgctgatgtccgatggattttgtgcatttaagtagtaagctttttgaatggcgtagagcattttgtgctctttattgtgctgccttgccacaagcacagcgcggcatgctgggtaagtagagcgacgtggttgcgcggtttgccaaaactcatgattaaacggtgtgccaagttgctgctctatacgcttccatgtttgctgtaaaaactgctgcatatcttttggcattggctcatctgaatcgggagcaaggccacccactttatattcaatagcaagtttaccaccaagggctgcttggagttttaaccaggtttctctatagccccaacaccaactacacatggggtcgtaaacataaattagctttgccatttagcttatctcactcaattccgacactactaagttacgcccttttgctttcgctttatagaggttgtcatcagcttgcttaattgttttactaaattggctaccacgttctaggctagcaataccaatgctgcaagtaatggtaacagactgcccaacatcataagggatttgcttttgcgcaacataagcacgtaacttttcggctacagcatgagcaatctgaatccctgccttaggcaataaaatgatgaactcttcgccgccatagcgtgcttttatatctgtgccacgcaatttatcgtgcaacatagcagtaaacgctatcaagacctgatcaccaaagtcatggccataactatcgttgagagatttaaagttatccaaatcaatcaataataccgacatgggtaagtagtttgccgcttcagcttcaaggcgaggctgaatatgttcataaatataacgacgattcgcaaggcctgtaaggggatcggtcaaggcatcgcgcttttcaattaaagtgatatctgcaatcttttgatggcttttttgtctgaagtattcactaattgcagaaaacaaaatcaccatggtaaaagaagctaaaaaacgcgacatttcgactggcccgtatttagcttgaccaatatctggcccgagtaataaaaccaatgcacttaagtacatgctaccgacaaggatactgcccgttcttaagcctaatgtgacatagcttacaatagggtaaaacatcaaccaatacagtgccgtattttctttgccaccggtataaaccaaagacatgcataacaacaaaataattgacaaaatgatactggttactaaaaccagcgcaccagtacggaagtaatacaacatacacaaaacaatggttatatcacttaccaataacatcactgtcaattgcactgcgtaaatatggtagttagacaacactaacgaagtgatcaatacgatggcaaaaaatgccatagtaaataacgtgaaagcacggcgttgtttatccgccgtgtcgacactgtttatggtgatggcactaagccagttttgttccaattgtaaatgctcggtgtaaaattaaactttaaatttcaaaacaagtttttctaattcataaaactgtgcttttaacttagtgcattcattaagtgtattgttaaggttactttgaccttgattagatagttcgctaatcgaatgaatgtcactgtctaagctctggatcacatggttttgctcagtcgtagcattggcaacactgtgatttacgtcgtcaattgattcaatagctcgtgtgacttcagccattttatcgccggcaatacgtgcctgctcgacactcttttcgctatcgcgaatactggcagtcattacctctaccgccgaggctgagccttgttgtaactgagaaatagtgtcttcgatttcttgagttgattgttgtgtacgatgggctagttgacgcacttcgtcagcaacaaccgcaaaaccacgacccgcttcacctgcacgggccgcctcaattgcagcattaagcgctagtaagttagtttgttcactaacaccttttatcacttcgagaacttggccgatgcttactgtgtgtgcatctaaactattaatagttttttgtgcctgctccatattacgagacaaagcattaatagcctctaagttatcagctaaggcagattggctttgtaaagattggctattagcactggttgctaacgttgatgcattactagcactatttgatatttcaaccgcgctagatgtcagctcattgattgcggtggcaacgttatcagtgcgttttgtttggtctgcatacatgtcgagggtgccttgagtttgattaactaaactctcaactaggcgttcaagttcaacggtggtatttttaacttgctcaattgatgtatgaattttttcgataaacgcattaaagtaatggcttagctcgccaaactcatcattgttttcaacctcaaggcggcgggttaaatcgccctcaccctctgcaatatctttaattgcatcgtttaagcgctgcattggacgcattaaatagcgaagtaaaaactgcatcattaatacaatcgcaactatacccatcagcatgtagatagccgccatatttctaaatgaagcaactgatgaataagcaatttcttcgttgatcaccactcctaaataccaatcaacgttttgaatccctttaattttagtgaacgaaacaagtttatctaaaccacctacctgtacttctacaaattcagattttaacgacaaacttttgccaaataagtcgcgcatgtttttatcgttaaatttagtttctgggtggcttaaaattcgcccttcactatcaagtaaaaaaccataaccgaaacctaaaaagtcaatttcgttgacgattttagttatggttttcatatcgatatcggcacctgcaacaccactaaatacgccgtttgcttgcattggtgctacagccgaaattgttagttcattggttgttacatcaatataaggggctgtaaatgcagtattggttttgttctcaaccagtttgtaccatggacgtgttgtagcgtcgtaatcgggtggcaacacaacagattggtcgttcaacacaaaggtgccgtcagtgataccaatataagtatttttgaagttaccggctttgtcagctgtgttgagttgtgtgagtgtcagttctttactgtcgccaagttgatatgtgtcagcaaccgacgagacaatagctaacttagcattcaaccagttggctatgttttgcgacactgactgagaaatctcttgtagaaccagcgaaagctgctcctgcgtttggctgcgcatagagatgaagttgttaatcgtgaataaaccgagcacgatcactaaaaccagtgatgcagccacagttaccttggtggtaaatttaagagtgctttgcatgacaaacctgtttgttatttttttcgttgttagcgcatttatatttaacaaatttagagctctttgtcttataaatttaagctaaaactagaaaaaacgttcattattgaaaataaacgctttccataaaaatcaattactttgttaacggcagcaaatcctgcatctaaagtaaattattagatcaatttaaaaatacagtactggaacgttcctaacaaacaggtaaaaaatacattctgaatacgtattcattaaatctatttgtcatttaactttgtttataagactgaattacaaacataaaaaaccccgcatctcagtgcggggttttttattaaatagctatttaagctatgcgtttcttccagctatcagccaaacgtacaacgtttaagccataccaagcgataaatgcataacaaatcactggtacaaagaagctttgctgaatactaaccgtatctgcaaccacaccttgtactaatggtactaaggcaccaccaacgattgctaaacataaccaacccgaacctttactggttagtgagcctaagctttcgattgcaacagagaaaatagttgggaacataattgaattgaataaaccaatcgctagtacagagtaaagcgctacatcaccttcagtgaatatagtcactaacagcaatacaataaccatcatggcattaaagaataacgcttttgaaggcgcaatcttttgcagtgcagcagagccaataaaacgacccaccatagcacccccccagtagtaagcaattaggcttgcagccgcatgctcttcaaggccagcaatatgctcttcaccaaagtaatttactaagaagctaccaattgaaacctcagcacctacgtaacagaagatacccacaacacccatcattaaatgaggtgcttcagctaggctgtggcctttcgctttacagtcttgctcttctgtatgctctgcaattactggtaatttaaagaaggcaaataccacagcaatagtcagtaatgctgctgcaagcataaggtaaggtacttttaccgactcagcggttgctgcgtttgcagctaacgtacccgctgtaccgaagaataaaataccacccacatatgggccaactgttgtgcctagtgagttaagtgcttgtgctaaatttaaacgtgacgatgccgttttttcaggacctaacgccacaacatacgggttagctgatacctgtaatacggtaataccggccgcaagtacaaataatgcacctaagaataaccagtactcatgcacaacaaccgctgggtaaaataacatacagccgattgatgccacgactaagccagttagtacaccgtttttgtagcccatttttttaaccaacatacccgctggtagcgaaacgataaagtaagcaccaaagaaacaaaactgaaccagcattgcctctgtgtaggttagatcgaataccccttttaaacgcgggattaaaacgtcatttaaaactgtaatgaagccccataaaaagaacagggttgtcattgccgtcagtggtagcaggtagtttttattttgctgcgaaccatcggcgacaaacgattggtttgtatttatttcactcacgtggttttcactccgttaacaagttatctttgattctacacattgaagcaaaaatagcacaaagatttactaggaacgttccaatatttttatttcctgctatagttgcaaaacgaacatagatttattgatacaccatggccacagttgactttaaaagccctgtttttcttaaacagcacataaaagacatccttgctttttatcatcctcattgtgttgatcatacagcccatggcttagctgggttttatcagtattttaaaaatgatggcgctatttacgataaacaaactcgtcatttagtatcgagtacccgctttgtttttaactacgcgatggcgtatatcgagttcaaagaacctgaatatttaagccttgctaaacatggtttagcccaccttgaacatgcgcataagcaagcatccggggttatgcttggcttataaagcaagatgagagcggcaaggtaactgttttagacgataccaaccattgctacgggcttgcctttgtattgcttgcaaacgcagttgcgttaaaagcaggcattagcgattgtaaaaataccatttcgcaggtacgggacttattagagcagtactactttgaaccccagcataatgcctacttagatgaacaaaatgccgactttagccatgcagatgactaccgaggccaaaatgccaatatgcatttatgcgaagccttactcatgtgttttgaagcaaccaacgagacccgttatttaaagcgtgctaaacagcttgccgagacctttacagtaaaactagctgcacacagccaacagtttgtctgggagcattacaataaaaactggcaaatcgatttagattacaacaaagatgacccacagcatttatttagaccttggggatttcagccaggtcatcaaactgagtgggcaaaactgttacttattttacaccgccatattgatgaaccttggttggtaacgcgcgccaaaagcctgtttgatgaaaccctaagcattgcatgggatcagcaacatagtggcattttctatggctttgcaccagataagcaaatttgtgatagcgataaatacttttgggtgcaggccgagtcattagcggcagcggccctactcgctgatgccacaaatgacgaaagctattggcaatggtacgaaaaaatttggctgtacagttggcagcatatggtagatcaccaatatggtgcttggtatcgtattttatctgcccaaaaccaaccttacagtaacgaaaaatcgccagcaggcaaaactgactaccatactatgggtgcctgctacgaagtattaagaaccttaaccttgaggaatgcataatgagtttagtgtgttttggcgaagcattaatcgactttttatcagatggtaaacaaccagagtcatttaccaaatacgcaggtggcgcacctgccaatgtggctgttgcagcagcaaaactaggcctaaacaccagcttttgtggcatgttaggcgatgatatgtttggccactttattaaagatgagctagatcaacatagcgttaatacatcttattgccgctttactgatgcagccaaaacagcgcttgcatttgtatcacttgatgaaagtggtgaacgctcatttagcttttatcgcccaccagccgctgatttactttatagcgtagacgacttcgaccatgcaatgtttgcaaatcacgccatcatgcatgtatgcagcaacagtctgactgagcacaacatctatcaaacaacaatttatggtttaactcaggcgaaaaaagccggcgcgatttgtagttttgatatgaatctgcgcgaaaacctctggccaagtatgcgccatacactcgatagaatgtggcatgttatatctttggcagatatcgtaaaactctcatttgaagaacttgagtttttaaatcaaaaaagccatcaagcaatgccacttgaacataccattgatgccattttaaaggccggtgtaacctgcttgctggtaaccaatggcggtgaagctattagcttctatcacgcagattttaaaggccaagttagcccaccagctacaaaagtagttgataccacagccgcaggcgatgcctttatcggtggtatgctgtcaaagattggtcagcattgtgaaaacaaacaaagctttaaagcgttttgccaaaccccagcaaatattgaacaaaccattgcttatgcagctaaagctggcgcttttgcagtaagccgctatggtgcatttgcttcattgccgagcgcggccgatttagcctaagaatgttgagtttaaagcccagcattaagtaattaatgccgggctgattcgctattgctcagttgtacatttatcgataattggtaaatacctaaacaccttcatgtttggatcgatcaccacatgatcccccgcttttaaagcaatgctaatctcgccactttcaacagaataagtttccaacgagccatttatttgcactggaactggcatagggaatgactttccttgcaaagagttcttgttccatttaagtgtcaatctgttagctgattgaacaacatcaagtttaggtaattcagcctgcttaagatacatattaaaaaaccattgatagtctttacccgttaaacgattaacaatgctaataaactcgtcggtatttcgatagcgcggtgaaattggataagccaattgcttagtgtcgttcaaaccataaagtagctcacgtgttgcttgccaaaatatatcttcaccaactagccagcgaagagtgtgtaatgtccagccacccttgccatatatatcagagttaaacgcttggtcagatgttacttgtccatcaagcacaatggctttacagtttttcagccctaaaaacgacttatacatgctgtggttataagctgcgtcaccaaacttatataggctgtaacttggttgcatataaaaaccaaacccttcatgaagccatgcatcattgagcttctcatgagtcattaagttgccaaaccattcatgagctaattcgtgttgcagtaaccaatcataaccattagggtcgcgtttgtattttttaccatacgcgttgattgtttgatgttccatgcctaagtgtggcgtctcaacaaaacctaacttttcaccgccccatggatatggaccaagcatcttttcaaaaaacataacctgttggcgtaaatcattttcgataagctcgcgtgctttttgctcattttttttgagtgaccaaaattcgatgggtacagtcgcgccgttaacactggtgtaatcggtttgaattcgcgtataggggccaatattaattgcaatgttatagtcactggctggcactgataacagccaatcaaactgctgtttattaccatcaactggcttcacttcttgtaaaacgccattagtcaccgcacttagtccttctggtactgttagacgaatgcgcatactatctgctttgtctgcaaaatgatctttacatggccaaaataagtcgcagccttcaccttgtacagccgttgctatccaaggttcaccttcctctgtttttgaaaatacaaaaccgccatcccaaggagcatttttagctatatgaggaaacccttgataggctatagcaatgcttaccatgctgtcttttgcttgttgttcacctaagtcaacccgaattacaccgccatctcgttcatatttaagagcctccccttttgagctcacttcattaattgtaaagcggctatccaattttaattctacaaattgagtggcttctagcactttaaactctgttctagcaacaccttcaatacgttggttatctggaaatacctcaagtgccaaatcgtagtgcttaacatcacttttaagtgcaattgtcgataaagcttgccctgtatcaccaataacaggatccaacgcaacaggttgtgaactacaagcggctaacacagccgatgctacgagggttgttgctactttaaaaaattgatttagttgcaaaatccttttccttatcgttatttttatttattcaaaatgacatgagcaattatttattactaagatttgcgatgaaattcagacataatttgaaacaaacaaaaataatgatctcactctaagaggtatctaaacctagaactgttgatgataatcatggtatgtttttcaactaattaaagaaaaaggaattcatcctatgaataataagcttcttgctggaggcgcgattgccattgttgcaggtgcattgttgtactctcaaaataaagccagtgttgatgtagatttacctgagcttgcttacgtgcctgccgatacggcggttttttatggtcaacttaagccgtttccgtacagcaaatactttgcccttatgccagatgcaatgaaaggcacgagcgatttaacgcccatcattgctgagcttaaaaccgttgatgataagaatgccctattccttgcatcactgatggaaaaataccaacaatcactgagctcttacgatgccttcaaatcgatttggggctttggtgatgactacaaaggcatgatgtatgcgcaaggtttaatgccgattgtacgttttcaggtcgctgatcaaagcagcattatcaatagcattaagcaatctgctgatgaaacaggtattgcgtatacaacagaaagccttgaaggcgtaagctacacccgctttgcgattgaacttgaaggcttagataacttcaacctaattgcatcaactcacaacaattgggctaccttaacactgaccactgcgctttctaatgatcaagatttacgtattgcccttggtgtagaaaagccggctcaatcattggctgagactaaaaaactgcctgagcttattaaaactttctcgcttgatggcaactcggttggctttgttgatcatcaacgtatcgccaatgcagtaactggcaaagaagactctcgcttacaccagatgctcaaagagctacttgataaagcccagcaatcaaacgcatttgcagcgatttcaactcctgagtgtcaagatgatattgcagccattgccgcaaaatggcctgcaacagtatctggcacaacaaaaacccgtattaccgccgactacgccgactttgacgtaaaagcaatattgcaaagcacagatcaagacttactaaataccctacaagccgtgcgtggttttgtgccaaaacataccactgggcttgacgggcaaatgatgagtgttgcttatggtattgatgtagcaaaagtcctgccgctagcgaatacattaacgggtgcaattaagtcagctgagtttaactgtggcccaattgtcgcactacaaaatgaaatgcaagaagtaagcaccgctggccttgctatgatgtcgggttttgcaaacggcgtgcaaggtatgagtgtgagtgttcaagacgctgcattgaccattgatgactacaacggcccacaaatagacaaacttgatgccatcgttaccctatctgcgaccgacgcccatggcttgtattcaattgcgcaaggttttgtgccgccacttgcgaacataaaactaccagccaatggtgatgcagtgctgatcaatgaatacattccatcgcctgtgccacttaactttgatattaaaatggcccttaaaggaaatcatattgtgattttcacgggtgataagtcagcgcagatagccgagactttagagtcgcaaagtgtcactaaaaatggctttgtgaacatggcattcgacgtacaaaaaatcttattacctttgcttgatacgattgcatcaatgggtcaattaagtgatgaagaaatggctgagcttgattcgctacgcgaccaacctgtaggtgtgtattttgccacagacattaccgacaacggcattggccttgaaagtaacgtacaaattactaaaaagtagttttgagtttgaatctaaaaagagcgctatttagcgctctttttttgttgccatttaagtgagttgttagtgtctcgactattacaaatggtgtcgtttgaactctcaataccaccgagtttggcaagtcggtcgtacagcacaacattgcaggttgcggctaggttcatacagcctatagttggtacatacactacttcatcacaccatttcagcacgtctttactgaccgagccatcttctgggccaaatacataaaatgcgttttcagggtgcttaaattcaggcagcggcgttgcaccttcaacaagctcaatcaccaccgttgtggcaccgtcaggcttagcttgctctaggctttcaacttgcgtaagtggaatatgctcaagcacatttttggtatcggtgtgatacttattagcgcgtaaatagcggctaccagtaaaaaacacctgcttggcgttgtaacaacccgcggcacgtaatacgccacccacattggttgggctttttgggtttaacaagccaatgctggctttaagtgtgctcattaatcaatgtctctggttggccactcggccacgtaaaggtcaaagtcatctaggtctacatcacagtctttcactgttttgtcacgcacagaaatacccaactcatgcatcatgtctttactgccaccgtttagtagcgggtgccaagacgcaaggccacggccttcgtaaaggcggcggtagctacagctttgcggcataaaaaagatatctttgaggttttctttagtgagctttacacatgaaggcaccaaggtttggcggttcgcatattcgctacacccacaggtgtcgttgtctaggtattggcaaacgatattagtgaaaataagttcttcaccctcgcgaagttgatccgttgcggtaaattcatcttcgtcttcactgtcgataaatgtgtttaaacaacatttaccacagccgtcacaaatggcttcccattcaggttgtgacatttgctcaagcgagcgcttaagccaaaattgatcttctaacatggtattactcaaagcccctaaacagcgcgcattctagcgtaaagccagcatgcgcgcaaaggtgctacttttgctcgttaacccaacgcttaattttctcttcaagaattggcataggtaatgcgccatcaatcagaacttgcgtatggaaagctttaatgtcgaacttatcgcctagctctttgctcgcgtagtcacgtagttcttgaattttgaactgacctaacttgtacgacagcgcttggcccggccatgcaatgtaacgctcaacttcggcgataatgtcgctttcggccattgatgagttagccaacatgtaatcaataccttgttgacgtgtccaaccttttgcgtggaaaccagtatcaagcactaagcgcattgcacgtaattgttcatctgataaacggccgtaccacatgtaagggtcggtaaataagccaagctctttacctaagctttctgcatacaatgcccaaccttctgcaaataccgtgtagccaccaaatttacgaaacagcggtaatccttcaatttcttgctgcaaggcaatttgaaagtggtgacccggcgcggcttcgtgaatagataaggtttcaagtaaaaacttaggctgtgcttttaggttaaaagtattgatatagaaaatacctgggcgcgaaccatctggtgctggcgactgataagatgcacccgcagcagattcagcgcggaaatcttcaactgcttttacaacgtatggcgcttttggcgcaatatcgaacatttgcggcagcttagcatcaattttttcttttactgcttcgtacgcggcaattaactcttctggcgaatcgtagtaaaactcatctgaggttcttaggtgttcaaaaaacgcttttaaatcgccttcaaaaccgacagtctctttaacttttttcatctcagataaaatgcgcgatacttcgcttaaaccaatatcatgaatttcatcggcgtttaagctaagcgttgtatgctgtttaatttgatactcataccatgctttaccatttggcaggtcgctgtaaccaatgctttcacgggcatttggaatatattcattagctaaaaagtcagccattttttgatacgcaggcactaaacgctcgctgatcatcgccgtgtacgcgcttgttagctgtgctttttgctcgtcgctgaaagattcaggtaactgagcaattggcccccagaataatgactcttctggtttttctactatatgagtttgaaattgcggtaatagtttttcagcaagcggtttaggaagaaccactttgtctttaatgccttggcgcattgattgctcaacactgtctaaccaagcgatgaaaccgtcagcacgtttttcaaatgcttgataatcttcaaccgtgttaaaaggttgtgcactttgcccagaacctaacgcagcaaaggtattgtgcgccccgcccatttggttaattggcattaagtaacttggaaactgagcgccttcaatcgcaaggtctaaatcgcgggctagaatttcgtagctcaataatgactgacctgttaattgcgctttgtcgatatttgctagtttgtttttgtattctttaacaaagttaagctgctcgtcgcggtttgctttactaataggtgcaataaattggtcgttatattcgctacgaccaatgtaagtaccaccaattggattaaactttaagcctgcttcaaagtagtctgctagtaatgtatcaagttgctctgtggctgacgttgcgcttggcgcttgtttgcttacttcttgagttggtttttcgttgcttggcgttgattcattacaaccaagtaatgcaaacatcaccgccgaactaagtagtgctagttttacgtttttcattctttccctgcccttatattaagtacgcgtaaattatgagggtttagttccctatttagcaagtatcgctgcaacttatcgcagtttatttacactttgcaagctgattgctagagtggcggctcgacttaccaattttgaataaaaatgaaaaagacagctctcgctattagcctaggccttgcttgcctaacctctttaaatacctacgcaaccacctacttatcggcaaaagctatggtagatgtaaattcaggtaaactgattaaatcaccacttatcagtatagataatggtcaaattacagctgtacaaagcaataaacagccaaacttaaaagacggcgataagcatattcaattaccagagctgactctggtaccaggtttaatggatatgcatgtgcatttaacaagcgaccctaccgtgccgcgcagtgagcgaattggtcaatcgattccgcgcaaagcaattaaagcggcgcactttgccgaaaaaacactgtatgcaggttttacaacgctgcgtaacttaggcgcagaaggctacagcgtgattgcagtacgcgatggcattaactcaggcgatattgttggcccacgtatttgggcggctggcccgtctttaggtgttactggcggtcactgcgataacaaccgtttaccaccagaaatgaaatacaccgcagaaggcgttgctgatggcccatgggcagtgcgcgctaaagtacgtgaaaacattaagtacggtgctaatgccattaagttttgcgctacaggcggggtattttcaaaaggcacaaaagtgggtattcaacaatatagccaagacgaaatgaacgccattgttgacgaagctcatttacgtggcctaaccgttgctgctcatgcgcatggtacaagtggtattaaagcggccattgttgccggtgtagacagtgttgaacacgttagttttgttgatgacgaagccattaaacttgcgaaagaacacggcacttggttctcaatggatatttacaacactgagtacacccttgcctttggcgaacaaaacggggttgcagaagaaaatctcaataaagaacgccaagtatctaaaaagcaacgtgatagctttagccgtgcagtaaaagcaggcgtaaacatggtatttggtaccgatgcagcgatttaccctcatggcgataacgcaaagcagttttcgcgtatggttgaatttggtatgacaccactgcaagccttacagtctgccaccatcaatagcgctaaactgctaaaaatggatgatcaacttggccaaatcaaaagcggtttcttagccgatattatcgccgttaaaggcaacccgcttgaaaacattgcagtacttgaagatgtacaatttgttatgaaagacggcaaggtttttaaataagctattttgctggctttgcatgagtgaagccagcaaccctccttgtatctatatcgtaaacaagattaccagtcataaaaccagttgttagcaacttgtatccaaataaagaaattacccaaaacagataaataaaacttgaaatgaaaacaactcgcattatcattgccgaaaaacatcgacaatttacctataatgacgacacataaatactcaattttagccctagcctgcttaagcgcattcaatgcaaacgccaacgatttagactcagttgaacgtattaccgtatacgacaaacaaaaccgtgtagtacttgattctggccttgctactaaatcaaatatgagcctaatggaaacaccagctcctgtagtggttgttgatcaagagcttatcaactcgcaaggcgcaacaaacttacaagacttagtgcgtaacatcagtggtgtaacccaagccggtaataactacggcattggcgataacttagtgatccgtggtttaggcgctaactatacttatgatggcatgtacggtggtgcaggcctaggtaacacctttaacccaacacgttcaatgaccaatgttgaatctgtagaagtacttaaaggccctgcaacgggcttatatggtatgggtagcgcaggcggtgttatcaaccttattgaaaagaaaccacaatttactgagcagcacaccgttaatgccgagcttggtcaatgggatagctactcattaggctttgatagcacagcagcattaaccgacaaccttgcttatcgcgttaatgcaaaaaccgctcgcagcgatggttaccgcgacttaaaagacgaccgtgatgaaatttatggcgcgttaaaatatgtattgagcgacaagcaagacatcatgatttctgccgcttatatcaaagatgccattgctgttgattcaattggccaccctattcgaatttttaacagcgactcagtgaatggtaaaaccgcaggtgaagtaaccgctgccgatttaattaacgatgcaacggcaaaaggcctacaactaaccgaacagcaacgccaacaattagcagactcactggcagcaaatgatggcctaacgccttatacctttggtcataacggtattatctcgccaatggcaaatgataacgaaggcgaagagctacgctttaagttaactcataactactttattactgataatttatttttaaatcagcaattacaataccgtaattacgattcgagctttgcccgccaaacgggtgcttataactatgtttattggaaccgtaatggcgtgatcaatgccgacccgcgcgctcctttagtggttgatgacgtactttacccatttgcagcgcgtcgccaagaataccgccaagtagaagccgaagaaaaatcatggcaatactttgctgacttgcgttatgactttagctttgccggtattgataacgaactacttgtaaacgccaactacgaagaccgcgatattcgttttaaacaatactcaatttacgatgctgatcaggtcattaaaaacaaagatggagaggttatttaccaaggccaattaccttacatttttgatattcgtaacccgaactggggcgaaggcagcttttttgattacgatccgctaaaaaccagcgattacaacaaaaaggttcaggcttggggtgtgggtattcaacatgttgcctatattcacgatacctttacaacccgagtaggtgttgcttttaatcgtattaaacaaagctacgaacactttggtgtagatgcgcgctaccgagccagtgccgccgagccaacgccagaagcagatacatcagacagcggtatgacctacaacctaggtgcaacctacaaacttagcgatgatatctcgttctttgtaaaccactctaaaggccgtacagcctacagcgtgcttggcagtgtatcgggtaacgaagcagaccgcgatgacgcagagtcagtcagtaacgacattggtatgcgtgtaaaagcctttgacgatcaactactagcatcacttgtggtatttgatagtgcccgtacaaaccttgagtatgccaacccagattacgaagccggtgtatctgatgcctcagtaccaaagagcttttacgatggtgaagagcaaaccaaaggcgttgaacttgatttaaatgccgatttaaacgagcagtggaaacttaacgtaaacgcggtgtatcaagacgcccgcgataagaaaaaccctaactcatcatctttcgatactcgtcaaaaaggtgtgccttatgtaacagcaagcagctggttaagctatgacgctaaatggtttgatttagccgagccacttacaattagcgcaggcgtgcaatatgttgatgaccgcagcactaactcaacctcgtttggtattcctgatggctacgtaccaagctacacggtgtacgacgccgctattcaataccaaacagatgattggaaactacagttaaacctaaataacttgtttaacaaaacctattactcaaaagcaatgttcttaggcggtatgccaggagaagagcgtaatgctaaattaacctttagctacacaatttaattgtgaataaatagcaaaaagcgcggctgagttaagccgcgcttttttgtttttgagtgtttttcgacaaatagttttgatacagaggactggttagtgccaatttcaggcaatggattacaaataaaagaagattaaaactgaggctctatagcgcctttcataaataacattgttataactaatttacagttaattccttagttgttaatgctataactacttattcgaaagctatgttgtttggagctgaacttttaatccatcgaagtaaccttcgttattcaccatactcgacattaagtcagctcgcgtcctacgcatttatgaaaatcagcattacatctaatttgtttaatgcacttaaacctgaatatttggcaagttaaactccccttaatcgttaaaaacactaatatttataacacaagattaataccgaaaattcaatatcagcaatttcacctgctagttgatgaaaaagtatactttcgtttctggtaggttataacgtcgttatagcctcaaaaattgtagcctaaaatgtgaaataagtgtaacaaccaacaagtttttgtccacttttaagactttcttatgcgtttacactcaacttttaaagagcatacgcctgcactaataagccaaacttataatatagaaagcaccgaacaaagacattattgttgctgtaatcgccgcccatatagaaccaatcgcgataaatgctctatttggtaattgctccactcaccttcttattacatagcgccacatacaacggtgaaaagctacaaactgttttttagttagatttaaagcctaactggtacacttgaacaaatcagtactttttgagctaaaaactgaactagctcaatatcgtaactcaagttttctgcctcttctgtatacggtaaaagtagttccagctcagtttcgccatcttctgacttaacatgtacaactttacagcggatatcgtaaattctatctgctacttgactaataatatctatatttctgtttttaaaatttaaaatacaagatgtaactcccttttgtttagaactaaaaaagtcagacctagttttattttcctcgacaaacgcttgaaggtctgatggctcgacacattcatgaagtgtcgctttaagctgctctctttcagtacctccagacttcgatccaactattgatgtgatctttgaaatatcagagtctctctcaattttaaaagagggatctttcagaattgctctaatcttcctgttaaactcagaacgaaaataaactgggtaataaaactcgatagtttgataaaatgctaaaaactgtagaagtggcatatttacggcacttcgagcataccagtaaagcgaaatcggccctgaatcgtactcatattttgggtactcaatacttggaatggcgtttagatttagtttatctgttttacgctgttgccgacgaagtaacattggtgcgatactactttgaacttcaacactaaaaaatattgaatgcgtaattttttctaataattttatagcatcagaatggctatttattttaggggattttataacaacagaggtatcagccgagtaatttgatttagtaataacgcttagcgcagaacttattggcgaaatacttattttagttttttgtgattgatcgcttgaaataatttccgtacttgaaaattttcctcttctatcaacctctacaccaaaagctttaagaattctacggcggcgatagttagatcgccttggtccttcatttaaaattgtaaatgcggcctcaatagtgtttttttcgaaactgcaaatagctgcataattacccactataatgtaattctcaaaatctatatcattgaaagtttttaaatcttctagatcccataggtctacctcaacctttttccgacctgaaggtagaaaaactgtaaggcttacatccacaactccaaattcttcctcaacggagaaatcattaaactcgatagacgactctttacaacgagatatgatttcattgataatttcccgagcttctccagcagcagcgatttcgtcctcatcatatccttcatattcatctgacattatttcttactccttcctatagaatctaacaccgcaattggctggtaaaaaagggctaaaatcgcgaagcgataacctaatgttttaattcgacttaatatccttgttaactgtcctttttgtcattatttagctgcgcaagtgtattggaagtccaaggttgagatttaccagaaaaagagccctgtgtttcctgtgttaaaggttttcgattttgtagctcttcaatagcttgtttatctgtactacctgggtttcgaaaagtaacagtagtagtgtgctttccctgttgaaccattagaccatctgtagctaatgttgctacatcagtcttaggatcccgatgaaaagtagcacctgttttaaaagttgctttctcgatattcattgaatcgagaatctccgtcattttttgtgcttgctgaacggctagattaatatttgttccagactgctggatttctgtgaaaggagttatttcattatttttttcagacattttcattccctctgtcttttaactttctgataattaaatttaaaactaagaccttactaagcgacaatataatagctggctaaaaattaaagagcttaagcaaacttctttttgtccatttaagcaacttgttatatgccttttatcccatactctcgttgcattgcatcatgtgtcataactatacactcttgatttctaaatccttctttgtaactaatcacgaagaatttttcttgtgtaagccagttttggataggtcccgcctgagatggataatgctcaataaacttgatgttctcaaaggctaagctgtgttcttcagattctttgaaatactcaatgatatgattccgtacatcttttaaacttggataaattttaggcccaagccacatcaaagccgataattcatcatttatgttaccagcagtattcattccattcgataaattttgttgtaattttgttaaaactcccattaagtcgtaggctttaattttcttaatgacgtcttgttctccagattttatcgaagcaagaatatcttgggagataaaatggctatatataccttccgaagcattaacaaccgaaataccgttccaacctagctgctgcgaagccattaaaattggtggtttcttaaatgcaggatctgtccataatctaagcctaaatatgagttcttgagggcttttatattggtttatagaatcgtatcttaatttcactaattatttcctttgtaataactctgaataattgattgacatatacaagtttaatagtctctcatcacacatatttaagttaacgccaagatcgtttatctactatattaagttttaacaaattacctaaggcaatacatcaataaatttctaaaatttttagtgaaagtaaaatgaacctatatacgcttagcgttcaaagctaaccttaatgtattaacatctactctttcaagtaacataactacttagccaacttacaattttgtcaaagtaaaaactgccagattcaattgaatcactcaaccaaacctgacagtactcaacaataaactcagcttaaagcgtcattacgattcggcctgtgatatcgccttttagcatgtcgtcaaaaatatcattgatatcttctaggcgtttttcttcaataatggctttaactttacctttagcagcaaagtcgaggcattcttgtaagtctttacgcgtaccaacgattgaacccacaacagacacaccatttaatacagtatcgaaaattggcaatggcatatcttcgggtggtaaacctacaagcacacatttaccgccacggcgtacgcttttataagcttgctcaaaaccgggttttgatacggcagtacacacaacaccatgtgccccgcccacttgttcaaaaatggtttctgaaggtacttgcttcataaagtctatggtgatgtctgcaccaagctctttggctagtgccaacttgctgtcgccggtatcaacagcaatcacattaaagcccattgcttttgcgtattgcactgctaagtggccaaggccgccaacaccaacaattgcaacccaatcacccgctttggcatcagtcactttaagcgctttataggtagtaacccccgcacaaaatagtggtgcggcttctgaaaaacctaatccttcaggaattttaaccacgtaatcaccatgggctacacagtactcggcgtaaccaccatcaactgaatacccagtgttgtgctgctcaaggcataaggtttctttaccttctaaacaaaactcgcaatggccacaggcgctatataaccaaggaacaccgacacggtcgcctactgataagtgtttaatgtttgcgcctactttttcgattgtacctaccccttcatggccaggtactaatggcattttcggtttgactggccaatctccatgacaagcatgtaaatctgtatggcacacgccacatgcggcaattttaactagcacatcgttaattcccacctctgggcatgggatttcttcgatagttaatttacctttgtactctttatttactgcagctttcataacgttcctccatggtattattagatttcagcctatacgataaacttattaactgtcactattattgatccacatcaaatagctaatcactgcggcatttaattaaactattattaaaattcaataacttaaatttaaataatcgcgtatctacactttagtagtagcagattgcatagtggctatttcttttagttataccccgagcgtgctagcatttaatttctgaaatttttgaatactaaaaattatgagcctatctgaaaaaaacttagcttttgttatgcactgcggtgaaatgggtagccgttggggctttaaccgcaccattggtcaaatgtgtggattattaaccattactaaagaaccaatgaccgccaatgaaattgccgataccttaagtatctcgcgcggaaacgtcagtatgggtattaaagagctacagtcttggcgcttaattaaagtgcatcatattccgggtgaccgtaaagaatactacggccctgctggcagcatttgggatatggccaaccgtgtattcgaagagcgtaaaaagcgcgagatagacccaacccttagcctgcttcgcgataacattttagaagaagcccacactgatgatgagcgctttgctcagcagcaaatgcaagaaattcacgacctactcgaaaccgtaactaaatggtctgcagagctacaacgtttaagccctgagcagctccaaagcctaatgaaactaggttctggcattggcaaggtacttgattttaaagataagattttgaaaaagccggggaagagtgagtaagttagcaagttagaccttgtaggcgtgaaacttgtttcgcgcgctctcttgtaggtcgtgctttagcgcgtcatttgagaaagcattcaagattgtgtcgccataaatgacgacctacatcaatataatccctcaacagaggcctttaaagccaaacatccaaagactcacgactgaaaccgttcctacgatgttttgtaggtcgtgctttagcgcgtcatttgaaaaatatttaacgttttgtcgccataaatgacgacctacatcaatataatccctcaacagaggcctttaaagccaaacttccaaagattcacggctgaagccgttcctacgatgttttgtaggtcgtgctttagcgcgtcatttgaaaaatatttaacgttttgtcgccataaatgacgacctacatcaatataatccctcaacagaagcctttaaagccaaacatccaaagattcacggctgaagccgttcctacgatgttttgtaggtagtgctttagtgcgtcatatgaaaaatatttaacgttttgtcgccataaatgacgacctacatcaatataatccctcaacagaggcatttaaagccaaacatccaaagattcacggctaaagctgttcttacgatgttttgtaggtcgtgctttagcgcgtttgaacgggtaatcatatctgctcttgcctttgctatactaataattaagtatttatttacgttctgacttaaaaggatattaatctatgtataaacagacagaaataaattactcgttaattattattttattagtgattagtgcctttataatcttatcgcctgaactagctggcctcaaaataattatattatcgataaacctgcttattactttgttattcttttcactaacaatagtcatcgatgagcaaacgcttcgttggtattttgggtttgggattattagcaaaagtgttgaattatctcagattgccgatacttctgcataccaaacaaaatggtatcaaggaattggtatacgtatgctaagtgatggctggttatataatgcctcagttggaaaagcggttaaaataactttaactgacggaaaaaacatataccttggctgtaaaaacgtagagactttgcaaaaagcactcaaagtaaacgtttaaaaattgtatcgaggggaaagtttgcgagtttgtcggaggcgtttcaacgccgaacatctaaattcacggctgaagccgctcctacaaaaaatgttcaagattgtgtcgccataaatgacgacctacaccaatacaatttctcgacgtaggaggcgttttaacaccgagtaagttagcaagttgctcgggtaaaacttgtagctttacccttggtacttgctaacttttattaatcaattacttaatcgctgggtaaccgatgcggtctgataagtaaccaacactggttgcaaagtaatacgagcgattccaatgcataagtgctttgtagttatcgtaggctagatacatacgaccgtttacgtcatcaggcattaccattgcggcggtaatatcaacgtttggtaagtcgctaccatccattttacgaaccccaagagcttgccaatcagcaaggctgcgctctgaatctttccaatactctaaccattggctgcgggttttagtgccgcgtttaagaatatttgaattatcgaagccttcaggtaatttaacttggcgaccccaggttaaatcatcgttccaccctgcttgctttaaataattagcaattgaagcaaatgcgtcttcttctgtggtccaaatgtctttgcggccatcaccattgtaatcaacagcgtaagcgttaaatgaggttggcataaactgcgtttgccccattgcaccagcccacgagcctttgaacttatcaagggtaatgtgaccctcttttaagatatcaagcgctgcccaaagctggtttttatacatagtttcgcggcgaccatcaaaagcaagtgttactaatgatgcaatcacactgtgaccaccttggattttaccgaagttactttcaaggccccaaagtgccacaataaaacgtgcttgaacgccgtattctttggctactttttcaagaacgtcttggttttctttgtataacttacgcgcgcggtcaattttccattgcggcacacgtttaggtaaataagtttcgagggtttcttttacttctggctgatttttatctgctgagattactttctttttaaatttagccgttgcgaatgcttgctcgattaaggcttgatcatagcctttttcaattgcttctttttttaatgcagcaacgtaaacgtcaaaatcagcttgggttttttcttctgccagtactgatgtgctcaaagaggcactaagtaaaataacggcaagttttttaatcactctcaactcccttgttttttttgaattgggttaacaggttttcttctggcggtggtaattgtaagtagaaacctttatcaattaacgcttgcttaaccgtttcgatatctgcaaaacctaacttttcacgactagcaagattgatcatcattacgtatttaggttgaccaaacgtttctagtaaaggttcaggaacacgaccaaaatcgtctcttttttcaataaaaaggtaagtatccgcttttttaatacttttatacaccgcagttagcattatggccctataatatcttgcttaacgaagtcgcacactataacatgagtcaaataataagttagaaaaaatagattagtttttactgtgtatgccttgttcagcctgtgtttatatacaaactatactaatcaaaacaaatcaattgagcgtgtatgtcggaacaaatttttgagctaaaagggaacctttttacgttatctgttttacatttattttcagcagatacatccctcttaagtaagcagttagatgagaaaatcgcccaagcacctaagttttttgctggtgcccccatcgtaattaacttaagtgacatacaagacgaaacacttgatttctcattcttaaaatcaatgttaagcggtctttcgctaaaccctgttggcgtttgcaatggctctcaagagcaaatcgaaagcgccaaagctgcaggcctgtcggtgttaaattattcacaagacgttaagggtgcaaccgctaaacaacaaacaaatacatctatcgttgaaaaaaccgttcatttgcctgcgcaggttattagcggcactgtacgctctggtcagcaagtatacgcaaaagaccgcgacctaatcgtgattggttctgtaagtcatggcgccgaagtcataagcgacggtaacgtgcacatttatggcacccttcgcggccgtgcaattgcaggggcaaaaggttacaacgaagcacatatattttgccaaaaattagaagcagaacttgtttcaattaatggtagttattggatcagcgactctcttcagggtgaacactggggtagcgcagtacaaatccaacaaaaaaatgattcattagaaatttcagctttggttaaaggataaatctcatggcaaaagtgattgtcgttacttctggtaaaggtggtgttggtaaaaccacatcgagtgctgcgattggcacaggtttagcgcttaagggctttaaaaccgttattatcgattttgatattggtctgcgtaatcttgaccttatcatgggttgtgagcgccgcgttgtttatgatttcgtaaacgtaatcaatggtgaagcaaaccttaaccaagcgcttatcaaagataaacgcgttgataagttacatattttacctgcttcacaaacccgcgataaagatgcccttacccgtgatggtgttgagcgtgtactaaacgagctgaaaaaagattttgattacattgtgtgtgattcaccagcaggtatcgaagccggtgcaatgatggcaatgtacttcgctgacgaagcgattgttacaactaatccagaagtatcatcagtacgtgactctgaccgtatcctaggtattttacacagcaaatcaaaacgtgctgaagaaggccttgaaagcgtaaaagaacacttgctattaactcgctataatcctgagcgtgttgaaaaaggcgaaatgctttcggtagaagacgtacaagaaatcttagcgattaaactactgggcgttattccagaatcacaagctgtacttagtgcatcaaactctggtcaaccggttatcttagattctgaatcggatgcaggccaagcgtacactgatgctatcaatcgtttattaggcgaaactgttgattttcgtttcttagacgtagagaagaaaggcttatttaaacggatttttggaggttaatgtgtctttacttgactacttccgctcagaaaagaaaagcagtgcgtcattagcaaaagagcgattgcagatcattgtcgcgcacgaacgttcacagcgtggtacaccagattatttaccacagctaaaacaagacatccttgatgttattcgtaaatacgtgaatgtaaacagtgatgcagttcaggtgcagtttgaccaaaacgaagatgacttagcggtacttgagctaaacgtcactttacctgacgaagaaaagaaatagtcaaaattgggcgcttagttattcttaacagcgcccttttttatttctgctgtatttatttttgccactgcatatgaaactcgtagtcatcttcgcctagagttttaaaccctgcccgttgatatagcccatacgctggattagcttttagcaccgttaaattaatttctgatgtttgcgctttgagtgcatctaacacctttgtgcctagccctttgccctgctctttaggtgcaatttgtagctgtaataaactaattgcttggtcactaactatgaacttggcagcgcctacacattgcccgttatttaacactaaatgactgtgctcaaagtgctctgccactcgtgcttgatgctgctcaagtgataaaaataatccctgattctctaagtgctcaaccatggtatttaaccttaagtcgagtaaataggctttgtcttgctcggtagtcgctacaaattcaatcattattgtcttaaaaaaagaaaaaggtacttttataaaagtacctttttaggttgcaacaaacaacatatctaaggttagaagctataatttgcgcctaagtaaaaacgacgccccgaatattggttataggtaaagcgattactttgtttccaataaccttcttctaactcttctgttaggtttacaactgatgcggtaaacgaaagatcctctgttaagttatacgaggcattcacatctagctgaccatagtctttggtatataagttgtagccttggtgaataccattggcacggtcgtctttccagttatacgacgcacgaacactaaagtcgtcattctcaaaatacaccgacacattatattggtgcttagccgtgcctggaatttcagcctttgttttttgcccgtcagtcgatacttcgctggtgctggtatctgtgtaggtatagttagtcaaaataccaaaaccattatcaaacgaatgctggaagaacagctctaagccttctgattttgcatcaccgccacccactttggtgttcatttcaacttcaattgggccattacaacagttgtgctcacgctcaactatttctactgatgaaatcggtaaattagaaatatccttagagaataaagttgcccctagcgcagagccatcgtcgtaataccattcaacacctaaatcgaattgatcagatagcatcggctcaagcccggtgtttacagaagtacctgtaccacgaccagtccatgaatctggtgagttaatgttaactggtggtccgtatgattccgcttggcttaagtctgaataactcactcttgccattgtgcgcgctgcagcaaagcgaacaacaaggtcttcggttgcatcccatgctaagttaaagcttggtaatacttcactgccatcactactgcgttcattcgggtctgtatcattatcatcatggccaatgacttcgtcgtaagtcaaagtactaagctcagtgtttacatagcgcacaccaacattgccgcggaaatcttgccattcgaaatcagcttgtgtgtaaacagaccaaattttctcttcaagggcataggtacccgacagtgaaggcacaactgtttggctaaagttctcttttaagtagttatcaagtgctccaaaatcaaacgctaagaagttaaatgcaccggtatcacccgcactgttatcaacaacatggtcgctcaccaatgttggtgcatccgggtgaaaatctggattatggaaccactcagttcccggtaaataaccacggtaaccaccgttatccgctatgccgtcatcccaacgaaagtcgttacgaatacctttaatttcgtggtcgcggtatttagcccccacatagacacgggtgaaaaagctgccatctaggtcaaattttacatcagtttgaatgtaatcttctgagtcttcattttcagatgaataagaatcaaaccaatcataatattggtacgcttgtttatcggtggctaaatcagtcgacacttcgtagcttggttttccgttttcaattgaccataaccagctatttactgagcctaaacgtgcatcaatattagcgtaggtttcttttgaagtaccaccttcagcttcggtatgaccaagctttaatgtaacgctgtaagtatcgccataataagtgccttcaaaatcataggtatttgattttgactcaccaaagcgttcacgccctgtcaactgcggcgataacaaaccacgacgaacgggcacaccgccatttacatcggcatcaccccagttattgtcattcagtaaaccgttatcagcattaccataggcaaccaccgtatcgccatcaagcacaataccgtaatacgggttgtggttatcgttccactcggcaaaagtaatggcttgactagattggtcgtagcctagcttggcgccaaaatagttaaagtttaaatcaagtctgtcactcggtgcccactgaacagccacttgataaccatcgcgtgtacggtcttggtttgagtttgtaacgtacatagcacgaggcgcccacacattgttgtacacttcgcctgtggcttggtctaccagcgctgggcgctctgccccttcaacggtatctgagtgaaaacgccagtgtgatgcgttgttagtgatggttgttacggtgcgatcttgacgagtaaatccggcaagcacaccaaagttttcgtcgtcatttttccatgaatacagcacattaacttgcggcttagtgtcttcagacacatcatcgtaagttacctcagcgcttaacgcccctgagtttgcttccatttcaagtggtttacgggtgtgtaaaataactgtaccaccaataccgccttcatcaatgcgagcttcagcacttttgtatacttctacacttttgatcatgcttgatggcaatagcgtgtaattaaaactacgggtaggagtaccagaacctgatgaagcgatatagttaccgtttaattgggtaagtgtccaatcaggtgacgtaccacgaatactaacacggctaccttcgccaccatcgcggtcaatcaaaacgcccgatacacgttgtaatgagtcagcgacgtttttatcaggaaacttaccaatatcctctgctgtaattgcatcgacagttgcagctgaaagtcgttttattgctaagttttctgcggttgaagaacgaataccacgtacttcaatcacttctacatcgtcatttacttgctctgccgcgtaacttgtattaactgcagccaataacgaaatcaaaattgcattacgcttaaaatgccttccttgcccttttgtttttattacagtttgcttgcccatgcctatctccagttgtgtgttcggtttttgtttatgaggctttagcctctgcaaaaacgatttattgttgtcggtttttaaactgatttttggtagttaacagcttgttaaactcaaactcagaatagggggaggtggtcaaaaagtgataataaaaattcggtgacagatatgacaaaatcggcgttaagaatattttatcttattttttgtaatttatgttttatagtaaatcacaagtttacacagtcaaaaacacttgcatttaaaacaggaactaaataataagccactgatttataattaaaatactaacagaaacaatactatcattatggttcttaaatagatactttaaagctggtgtaataaacatggcaaacaaataacaatgagcaatggtaaaattcttgaagtctgcttaaatgaaacagacacaaagcagctgacaaacaatgttttaaaggctggcgacttaggtgtaagccgttttgagctatgcagtaatttacacctaggtggcctaacacccagtaagcctgcaattgacagtgctgtaaaaagcctaaccaataacgcacaattagtggtgatgatccgccctgaagctggtgattttattgttagtgccgagagtcacaaattaatggaaaaacaaataataatggcagcgaatgcgggggtgcatggggtggtattcggtgcagtaaagcatggcaaacttgatttagaggtgacccactctttagttgccacagccaaacagcatggcctgatggtgacctttcaccgtgcattcgataccctaacaaacccgttaagcgcacttgataaactgattagcttaggagttgaccgcgttttaacagcaggcacgccgtggcaaagcggccaaagtgctgttgatggtctaaatcagctcaacacatacttagcgcacagcgctaatcagatagaaattgtaattggtggtggcgttactttagaaaacgcgccaacactttggcaattaataaaaaaccattcagcaaaggcagctgtgcatgtacactcatgcgtgcacaacgaaaatggtgcaattaatgctgaggctatcaataagcttctttcaaaggattaagcatggcaatgtattttttaggtattgatggcggtggcagtaagtgtaaagttcgtttagaaaacgaaaacggcgcattgcttagcgaagccataagtggctctgcaaacgtggccaccagctgccaacaaagccaagagtcaatactccacgccactgaacttgcatttcatgaagctgggcttgccttaagcgagctgaaaaacacctatgtgcatgccggacttgccggtgctaatatcgactctgcctatcaagcaatgaccaaatggcagcacccttttgccaagtttaccctgtcaacagatatgctgattgcctgtaaaggcgcgcatcaacaccatgatggtgcggtgattattctgggcacaggcttttgtgcgggttaccaacagcaaaaccaatttagcgaattaggtggctacggattattactaagcgatggagccagtggtggttggttaggtttacaactttgccgtaaagcatttgcagtacttgatggtgttgtgcaaagttctgcagcaataaataccctactcacccagcttaattgcgactcaagccaagcgttaagtcagcgtttaatatcagcgcgccctgcagagcttgccaaatttgcgcccctagtttttagccattctgacgatgctttttgtcagcaattaatcattgaagcgtgcgcatacattagccgctatatcgcttactttgaaaaacaaggtattgaaaacgtcaccttgatgggcggcattgccagtgccatcacgccttacttaactgataccagtaaagcgcatttaactcccgcccttgccagtgctgagcaaggggctattttaatggcgagagaggcaatttaatcgtctaattgttcacgcatttgtgagggtatttcaccaaacaaacgccgaaattgtttgctgaagtaactcggttcagaaaacccgcactgataagcgacttgtgaaatgggcagtcgcgtttcgattagcagcttacgggcattttcgagacgcacttcgttaataaattgattgggtgtttttgctaagtgctttttaaaacgacgctctaaagcgctaaccgacaagtgtgcaagctctgccaattcatcaatactgatctgacgatgaaaatgctcacgaataaattttaccggctcttcaattgccctgacatgagaaagcgcttttgaggttttttgtaaatgtcgggttactccgtaagtgccaatcacattgccatcgtgatcttttaaagcatgctttgatgtagaaaaccaaccaagctcaccttgttgggtttggttaagctctaaacggtcagttactatgtagccctccatcacccgtttatcatcattgacgtactgaaacgcaaggtgctttggcgaaaaatcaaagtcagtttttagcaatatttgctccagtgttttataaccctgatgctcaataaaatgctgattacaatgcacgattctactatctgtatcttttacccaaaagaggatatctggcagtaaatcaaatgcagcaatcagctgatttacgccagcttttttaattatttcttgaatatccatcgctttaatttgtctctataaagaacaattctatatattttaaacgccgattttgttgcattgtcaaccgaatttttattagcgcttatcgcttaagctttcctattatcaataacatgatattaacagtagccgacgctatttaaattaggagcgcttaagatgagcaaagctaagatccgcatggcaatggtaggcggtggcgatggagcctttattggcgctattcatcgaattgcagcgcgattagatggaatgatagagcttgttgcaggcgcattcagttcagacgcaaacaaatgtaaagcaaccggcgaactacttgggcttgatagcagccgctgctacgacagttaccagacactatttgccgaagaagcaaaattatccgctgatgagcgtatcgattttgtggctattgtcacgccaaaccatttgcattttccggtcgcgaaaatggcgcttgagcacggctttcatgtgttatcagataaacctgcaacactcactctcgcagaagcagagcaattacaaagcattattgcaaaacagcaagttttatatggactgacccacacttataccggttacccaatggtaaaagaagccaagcatcgcgttaaagctggtgagcttggcaccatacgaaaagtaattgttgagtacacccaaggttggttagcgcacagcgaagacgaaggctcaaaacaagcaagctggcgtttagacagcagtaagtctggcattagttgttgtatgggcgatattggcgtgcatgcagctaacttagccgagtatgtctctgatctcgaaatcaccgaactttgtgccgatttaaatcatgtggttgaaggccgagcccttgatgatgatggcaccgtgctacttagattcaataatggttgtaagggcgttttactggcaagccaagttgctattggcgatgaaaacaacttacgcctgcgtatttatggcgataaagccagccttgaatggtcacaacttgagcctaatagcttatggctaagaggccacaatcaagccgctacgttactaagagctggcgtgggagaattacactctgacacacacaatgccctgcgcacccctgccggtcacccagagggctaccttgaagcattcgccaatatttaccgcaattttgcagcacaaattcatgcctttaagcaaggcgacaacgcaacaaattcagcatttgatgtgcctggcatcaaagatgccgtgcgcggtatggcgtttattgagcacgttgtagcttcttcaaaacaagacactaaatggcacaaattacagattggataataaagaatgaataaaatcaaagggccagcaatatttttggcgcagtttatttcagagcaagcccccttcaataactttaaaggtttatgtgagtgggcaagcggtttaggttacaaagcgattcaagtgccaacctcaaatccagacattttcgatttagaaaaagcagctcaaagccagcaatactgcgatgaagtcactggtattgccacagagtatggacttacaatttcagagttatcaacgcatttgcaaggtcagctaattgctgtacaccctgcctacgatgaaatgttcgataactttgccgcagagcatgtaaaaggtaaccctgctgcgcgtaccaaatgggcaacagaacaactaatgctagctgcgaaagcgagtaacaaccttggcttaaccacccatgcgactttctcgggttcttttttatggcataccttttacccgtggccacagcgtccacaagggcttgttgaacaaggctttagtgaacttgctaagcgctggttacccattttagattgctttgacgagtatggcgtggacgtgtgttatgaattgcatccgggtgaagacctacatgatggtgtgacatttgagcgctttttagcggcaaccaataatcacccacgcgttaatattctttatgatccgagccattttgtattgcaacagctcgactatttagcgtttatcgatatctatcattcgcgcattaaggcgtttcatgtcaaagatgccgaatttatcgcaaatggccgctcaggtgtttatggcggatttcagaactggcaagaccgaccggggcgttttcgttctttaggtgatggccaagtagattttaagcaaatctttagcaagttaactcaatatggttttgatggttgggctgtacttgaatgggaatgttgcttaaagcacccagaagatggggcaagagaaggcgctgagtttattaaagcacacttgataaacccaacagacaaagcctttgacgattttgccagtggcgcaacaaacactgagcgtaataatcgaattttaggtttataaaaccgacaacaattgaacacacaggacacacaatatggacaacaataattataaccgcatagtctttcggctttgctgtatagcactgattgtgacctctatgacctttgccattcgtgctggtattttgggtcaacttggcagtgagtttggcttaaccgacaccgaactaggttgggttaatgccatggcatttttaggttttcccgttgcgactatggtcggcggtattatttataatgccattggcgcgaagaaattagtggctttagcgtttatttgtcatttacttggtcttgttttaactatcactgctgatggtttttggggcttactggtttctacctttttgattggttttgccaacggggctgttgaagcgggctgtaatccactgattgcagaaatgtaccctaaaaataccaccactatgctaaaccgttttcatgtttggttccctggtggcattgtgattggcgcacttgcgtcgaattttatgtcgggagcgggtttaaactggcaatggcaagtggctttaattttagttcctacggttatttatggcgctatgctgatcaaagcgcagtttccacgctttgatacacgtactcactcaactagcagcaatattcgccacttattcacgccgttatacatctttttaattgcctgcatgacattcaccgcaaccactgagtttggcacacagcaatggattgagcgtattttagggtcttcaggcgcctctcctatggtggtgttagccttgatcaccggcttaatggctgttggtcgcttctttgcaggccccattgtacataggcttaatcctaccggtgtgttacttggctctgccatttgtgcaagcttggggatttttatgatgagtcaggccgagggcagcatgatttatctggcagcgatgctgtttgcacttggcgttacctatttttggccgaccatgcttggctgcgttgctgaatatattccaaagtcaggggcgctgggtatgtcgttaatgggcggtgcaggcatgtttgctatgagcatctggaaccctgtaattggtagctggatagataccgcacgctcatcggcacaggcaagtggcgcaagcgcagaacaaattgaaattttagccggacaggctgtattacaaaacctactgatcttcccaattattttaatcgtcgcattcattgggttgcatctagtaattaataacaacaaacgcaccgaaaaatgtgcgtcttaagcaagtaaatcgtcgaggaacactatgtttaaatctcttaaagcactgactttaatgctcaccgttagtagctgtgcactcgctaatgcggctgataatcagcttacacaacaagaaaagcaagctggctggcagttgttgtttgacggcaaagatatgtcgcagtggcgtaactttaaaagcgaatctttaaatcctgcatgggtcgttgaagatggcgctatgacattaaccaaaggtggcggtgatctgcttactaaaaagcaataccaaaactttgaattacagattgattggaaaatctctactaaaggcaatagcggtatttttgtattggctgatgaaaccgggaagatgatttactctcatgcgcctgaaattcaaattatcgataacgaagagcatccagataccgaaattgactcgcacttagcaggttcgatttacgatttatttgctgcgccagttgcggctcacaagccagcaaatagctggaaccatgtacgcattaaaatgcaagacaaccacttgcaagtttggcaaaacggtattagcaccaccagcattgtgattggtagtacaacatggaatacccttgttaaaggcagtaagtttgcaacttggaaaaactttgcaacggctgagcaaggtcatattgggcttcaagaccacggtgacaaagtgtggtttaaaaatataaaaatcaaggagctataagatgtctgattttaaacataaggtattagttgttggctctggtgctggcggtgcaatggccgcttatacgctaactaaactcggtcacaaagtgttattacttgaagcgggccgtaattatgacccgaaaacagaaagcccaatgtttcgtcgtaacagcgaagccccgcttatgggtgcaggtaacaaagacaaaaactttggcttttatgatgcaaccgttgatggcggctggcaagtacctgatgagccatacaccagcgccaaaggtagcgacttttattggtggcgcgcacgtatgttaggtggtcgaacaaaccactggggccgctattcattacgctttagtgaacacgattttaaaggtaaaagccgtgatggtcacggtgccgactggccatttgaatacgctgatttagcaccttggtacgataaaaccgaagagcttgttggcgtatgtggcactaatacaggccatgaagatatgccagattcgtcaccgggtattttacagccgccaccaaaaccgcgtgtgcctgaacttctaattgccgcttctgcaaagaaaatgggcattcaagcagtgccgatgcatcgcgcggtattaactcgcccgaaagatgatcgcatggcgtgtttttatgcaacaccttgtggctctggttgctcaattggtgctgctttccaaactacgacatcattactgccaatggcaaaagccaccggaaacttaaaagtcattaccgatgctatggttaagtcagttaaggttgatgagcaaggtaaagtcactggcgtcacttatgttgataaacacacagtaaccgaacatgctattgatgccgatgtggttatcttagccgccagcgcctgtgaatcagcacgtattttattaaactcaaagaataaaaatcacccgaaaggccttgctaattcaagtggccaagtaggtcgaaatttaatggattcgacgggtgcgtggttaggtgcgcaaattccggcacttaaaggtcgcccacgttataacgaagatggacataccgcaaaccacttatttattccttggtggggtcatcaagcacaagctaacaatgaattagatttcccacgtggttatcactttgaaattggcagtggctttggtcagccgggctcgggggtgtcgggtgataaacaaggttatggccctgcccttaaacaacaaattcgtgatgcatatggctcttacgttggctttgccctacgtggcgagatgctaccgaacaaagatacctacatggaaattgacgaaaacgttaaagacaaatggggtattccggtatcaaagttccactttaagtggtctgacagagagttaaagcaaatcgaacatggtttaaaaaccgcgaaacaaatcctagaaaacatgggtgcgaccgttggcgaactcccgcctgctgaaaaggcaatttcaaaaggtggcgaaatcatccacgaagtgggcaccacacgaatgggtagctcgaagaaagactcggtcaccaatcaatggggtcaaacatgggattgtaataacctatttgtaatggatgcaggcgtatttgcttctaaccctcataaaaactgtacgctcaccatcatgacactggcaatgcgtaattcaacttggcttgctcaacaaattgataacggggtactttaattatgcatcatcgtaacgaacacgactcatataactatgtttctaacatgagccgccgtgagtctttaaaatggcttggcttattagctgcaggctcagcggttggtttaactgcaggttgcacaaaagcacttgaagatgacggtgcattctctgcaaaagagcattggcctgatttagatattaagcctgtgaccgctaaaggctatggtcaagaccctaatttggtaatgccaccagaatcaccttggccactaaccttaaccgcagacgagcttacgttagtagcgctattagctgattacattgtgccacgcgaaggcgctattccttcagccagtgagctagaagtaccggcagttattaatgagtgggtgagcgcgccttatgaaggccaacaacgcgatagaattaaaattttaaactctctagcgtggcttaacgatgaagcgcagcttcgttttaaaaagcaatttgttgcgcttaacgaaaagcaacatcgtgcgattttagacgatattgcatttttaaacgagcaaacacctgcgcaatttcagcgtattggtaaagcctttttacgctttaaagaattagtgctggcagcatttttctgtacacctgaaggctgtaaagacataggctacctaggcaatgttcctattgctggtgattacccagggccttcagatgaagcaaaagcccatttagatcaggttttagctgagcttggtttaagcgagtacgcctataccgattaactttcccccttgtgttgtttaataacacaatttaatgcagggggtcactcccctgcttttttaggatttaagtatgtttaaaacccgcattttattgctcattattagccttgtatttagtggtcaattattcgcaaaactgccagttagtgtgcaattgtggtcagtcaaagacaccttaaaaaatgactttcatggtacgcttaaatcacttgccgaaatgggatttgacggcgttgagtttgccggagattttggcccttattctgataaccctgcggccttaaaagcaaagctctctgaattaggtttagttgccagtagtgcccacatcggctttgatgctctcaccgaaagcactattgatagcaccctactgttttacaaaacccttggtgttaccacactctatgtaccttgggatgagcgagcatggcatcctgaaggggttaagtcactggttaaagagctcactaaagttagtgattatgcaactcgctttaatatgaagatcggttttcacaatcataataaagagtttaatgcatttaataacgctacattttgggattatattgccagtaacacacccaagaccatgccattgcagttagatattggctgggtcaattacgcagctaaagatccaatttacttcattaaacagtaccctaaccgcacacttgctacgcacattaaagtacgtacggttgaggggagcaacatgagcccgattatcggcgaaaacaacattgattggcctgccatcatcgacactttagagtcgcacggcaacaccaagtggttagtgctggagcaagaagaatacccaagtggactaacaccgctacaaagcgttgcgaaatcaaaacaaaatctggataaaattttattaaataagtaattgattttgatctctagtctgaattaattgtttgtttaaaagtaagtgagtttcatactaaaaacctaagaaatcaatactgacactgattattttttatacttataaaatccgtttttttattcgtctgtgtcggttaaataggcatgcagctattagttgcatgccatattacttactattcactttattgtaagcaataacgaagcttcctttatttttcagtatagtaagtttaattggtactaataataagctgattttaagttatctacaaataacattattcactttttttgcattaacctgctctgacctttggtcaatttaaagttgtttcaaagcggctataaaacagccctcacaaccacataatatattgattaaaaatatattattcatcattcctagtaaaaaacatagataaaaaaataataataaaagctgaacacttgtccctattttcatttttttggcagattgctttaaattcttggagaggtagcattaagctataaaaatctcaagggatgagtatgaaagttctaaatcttaagaaaaggtcagaaaaaaaggtttattcttttttagccttattattgtttttcacattgatgttgttaaagcttttttctccacagcatattatttatgagctaatcgctgcgctgtgcttttttatcgcgctggttttgttctttctggcaattaactgcaaacatgctcttactgtttgccgacacggtatttattatcattcaatttgggggcaccactacattgcagcgcaagaaataaaattgattcagcattactcaaagtttggtttaagctgcatatttataataggtcctaggtttattatatttgctcctttttattgtttaacatcaaaacaaatgcacagattaaaacgatacgattacaacctattacaatggctgcaagtaagtaataaacgcgacaaattttatggctctaagctctgagcaattgcttagagccaaatttttagttatcccactctttaagggtgtcttttacaagctcataacgccacgagtttaataagtcgggttttgaactgtctttacgctcttgtgcatctagcttccaattccaactaatcaattgattgatttgctttttagatgcaagcacatcttctgggattccatttgctttagcagctttggtaattttttgttttatatctttagcggcttttttgtatgccggaaaatcaataagtcgttttagttgtgctggttgctcttctggcgcaaccgctttacccagctcgatgcattttaaaatttcaacacctgaacggtttacttccattggctcaacacccggaacgcggcgaagtgcattaagacttactggtttacgtttagctatttcaaccaagttatgttcttttaacacaaagttaagagcgagatttttgcgctctgccttttcacggcgccacttagcaagttcacgtaataccgctaaatcatgcggtcgtaactgccaagcatttttaatgtctttgtaaagctgctctgcaggtgtttgataagcacgtttttgcgcgactaactcactttcactgatcacaatgtcaaaaaagcctgcttcatcaatttgttttttaataatttcaaagcatgggagtaaatgaaaggtatcggcagcggcataatctagctgtttttctgtaagcgggcgctgcaaccaattagtgcgcgattcacttttatcaatttcgatatctagtaactctttgaccatatgcgcaaagcccatgcagttaccatgacctaaaatttgcaatgcaaattgggtatcaaatagcggtgttggtacaaagccagcgtacttttgaaacacttcaatatcttctgacggtgaatgcagtacttttaacacctctgggtttttaagtacttgccaaaaatcatagagcgataattctgccagtgggtcgattaacgctaaatgctcaccatcatatacttgaataagtgcaacttcagggtacagggtgcggcggcgcataaactcagtatcaattgctaatactggttttcctattattttttctacaaaatcatttaactgattttgcgtttcgatcagttggtattgcacttacacccctttgttttacataaaaaagccggctaatgccggcttttattatttctcttcgtcctttaaggctcttctaagaatcttaccaacgttggtttttggtaattcatctctaaactcaacgagtttaggcaccttatagttcgttaaattatcacgacaatgctttattatatctttttcagttaaagattgatcttttttcacgacaaaaactttaacttgctcgccacttacttcatgcgggacaccgatagcagctacttcaagcacaccatcgtgcattgcgacaacttcttcaatctcattagggaatacattaaagccagatacgataatcatgtctttcttacgatcaacaatgtagaagaagccttcatcatcgtaagttgcaatatcaccggttgcaaaccaaccgtcttttaagcattcagctgttgcatctggacggttatagtaaccttgcataacttgtgggcctttaacccaaagctcgcctggctcacctttcgctgcttcttcgccgttttcaagcattagtttaatgtcagtacttggtgctggtaaaccaattgagccgttataaccatcaagatcatatgggcttacagttacaagtggcgcgcactcagttaaaccataaccttccattaatttggttttagttacagcttgccatttttcagcaactggacgctgtaccgccataccaccgccaagtgacatttttaagcttgagaaatcaagttcagcaaaacccggggtatttagtaaaccattaaataaggtatttacacccgttaccgcagtaaatttgtgttgtgctaactcttttacaaaacccggcatatcgcgtgggtttgtaataagtacatttaaaccaccatatttcataaatgttaggcagttagctgttaaagcaaagatatgataaagcggcagtgccgtgataacgatttctttgccacgctcaagcacgttatctaaacagcctgatacttgctcaaggttaccaaccatgttgccatgcgatagcattgcacctttagatacacccgtagtaccaccagtgtattgtaaaaatgctaggtcgtttaaatcaacatcaggctttttgtaggttgcttcgttaccagccagtgcatctgcaaatttaattgcatttggcaatgagtagctaggcaccatttttttaatgtgcttaaccacaaagttaacgatgtgctttttaagaccaccgaccatgtcacctacttgggtaaccacgatgtgcttaacgttggtttttggtaaagccttttctagagtatctgcaaaattagcaagaatgaaaattgctgatgattcagagtcatttagttgatgctctaattcacgtaccgtataaagtgggtttacgtttaccactacacagcctgcacgaagaacacctagaatagtcacaggcgtttgcagtaggttcggcatcataaccgctactttatcgccttttttcagaccaagatcattttgaatgtacgacgcaacacgttttgtagcactgtctaactcactataggtcaacactttacccatgttggtaaaggctggaaggtcactatagtcagcaaaacttttttcaaacaagtcgagtagcgagtgataatgctcagggtcgattgtttcaggcataccttctgggtagcgtttaagccagattttttccactcttagctcctgtttataattatatttttttaataaccttaatctaactaaggccgtttctcaatggagtaaatactctaatggtgcagataatcccacatttggtgcaattatacaattaacttgctttatactgcccaataaatgcatgaatgtgctctaaggttaatgcaggactttgcatatggcaatggtgacctccaggtatctcatgaatttttaactccttgtaatatttaccatatgcctctaggttatctttcacaaaaggataccctttatcccctaagataagctgacatggtgcgtttatttgtttgatggttgcaatacattgtgcctcatcaaagcgaaatcctgagtgatttttaagctttggatcggttgttaaataccacttccctgctttttcgtaactattgcgtgtcattaatagctcagcttgtgggtattcaagatccccacttgcaagccttgcactaataatgtgcgctattgagtcaaatgcacgaggccctttagtgtttacacgcgctctatttaaaattgctttacgaagttggctgctcacttcattgctgtttgttgtaacacagcctattccttcaataaaatttaccgttgctaccttttcaggaaaacagctggcaaaaaccccggcaaccatggcccccattgagtggccaactaaatgcactttcgttacatctagtgactcaataaacttatatacgtcatcaatatagtcaataaagtaatagtgggcatcactacttcgccaatcagataaaccatggccaggaaaatcgagacaataccaacgctgattaagctgcacattttgtaacataggtatgtaactatgtgcgttatcaagccaaccatgtaaggcaatcacaacttcttcgccatgaccaaaggttaggccatgcattgcctgagtgccagtttgaaaagaaaaaggttgcacaattgctcctatttattaagcgtttcaacttaaaggcgtttatttatcgtctggctagtatacaataatcctcgcagtataaataagggcacaataataaggttacatcaatgaaattaaaattaagtcttttagcattattatgctcagcaggctcagtaatggctgaatcagcaccaaaaaatatcatttatatgattggtgatggtatgggcccggcgtacacaactgcatatcgttactttaaagatgatccaaatactaaagttgttgacccaactgttttcgatactattttacgtggtatggcacatacctaccctgatgatcatacctatgtaacagacagcgcagcaggtgcaacagcactgagtagtggccataaaagttataatggcgcaattgccgttgatactgataaaaaaccagtaaaaaccatgcttgaagttgcaaaagaacgcggtatgacaacagcactcgtagctacttcgcaaatcaatcatgccacaccagcaagctttgcttcgcacaacgaatcacgccgtaactacgacgagattgctaacgactatatcgataacaaaatcgcaggtaaattaccggttgatttaatgttaggtggcggcactaaatattatgttcgtgaagaccgtaatctagttgaggagtttaaagctgcaggttatcaatacagcgatgacttcgcagcaatgaatgacttaaaacaagttccagcacttggtttattcgctgaagtaggtttaccgtttgcgcttgacgaaaatccaacgcgccttacgcaaatgacaactaaagcacttgatttacttgatggtcaaaacgacaaaggtttttttgtgatgatcgaaggtagccaaattgattggtgtggtcatgcaaacgacattgcatgtgcaatgggcgaaatggatgactttgctaagtcaattgaacaagcaaaagcgtatgtagataaaaaccctgatactctgcttgttatcaccgccgatcactcaacaggtggtttaacgcttggtgctcacggtcaatataagtgggaaactgaggtgattaaaggtgttaaagcaacagctggcactatcacaaaagatctacttgaaagcgatgacttaaaagcagtatggcaaaagtattctgatatcgaattcactgatgcaaacagcattaagcttagcgaagctaagaaaatgggcgaaaaagcactgctacttgctgtaaaagatatcatcaatcatgccagcttcactggttggactactggcggccacacggctattgatgtgcaagtatttgcctatggtaaacgtgctgaagatttctacggttcgcaaaacaatactgcgattgccgacaagctgattgattttattaaacagtaatttatattgaatactgtccaagcataaaaaaagcctaaacattttgtttaggcttttttgtgaattcagtattagcaattagctaagcatatacatcaacgccaatgaggctttgcacttcggcgcggcgctctaagttagcaaattcggtgtaggttgaaattgcccggctgatttttgggttgcttggtttgtcataaattgtttgctgatagttttgcgactcagctttaaattcatcggcaatagcaactgcttgagggctcgatttaacatattcggttgacgatttttgctcagccgtttgatctgatatcgccttaggcttatcagtaacggtatttttacggctatattgaccaggaatgtcaccggtataaaagcctgagccaattggtaaagtcaaactcgtaattccacatcaaacatgactaaattatgtgccataactgactggcacgcaagtcccgttattctttcagttactctcggcctggtagctttttccaagtcactgtatcacgaacatatttaggctgtgcattggctgctgtcactgtttcaccgttagcaaaagccgttgcaaccgaggccagcatgtatttcgcatcaggcagtagaatagtttcatttagacttacatttgcaagttctgaaacaagcgaaggataggtctgccagccagtacccaccgcagttgcagctgtttcaggaagcgttagcaactcaggtttaataacttgctcttcatcaacaagtagcattaagccattatcatatgctttgtagtgagcgtaataaatctcacccatacgcgcatcaatcgcagaaaacacatcacttgcttggtgttgttcaaatgcttgttgcgccatcatctgcaatgttgatacgccaaccaaaggtaaacgtgccgcataagctaaaccttgagcaatcgcaacactgatgcgcacgcccgtgaagctacccggcccttgaccaaaaccaattacatctaaatcggttagtttacattgcgcctttgcgagtaactcatcaattaaaggcaaaatcttttggctgtgctgctgagggcactcttcaaaatgatgaaatgtttgccctcgataatgtagcaccagcgataaagcttcagttgatgcatctaaggcaagaatattgtgtttaatcatctaagttactctaattgatctgttctaaaaacgcgtttgccattgctaaatcgcgtgtgcggcgcatgggtggcaaactttttaaaaatacttggccgtaatggcgtgttactaagcggttatcgcaaataaccagcacacctttatctttactatcgcgaataagtcgccctaccccttgctttaatgcaatcaccgcttggggtaattgaatatgcgcaaatgggtctttaccttgcagctggcaatcttgcatttttgcttgcaataaagggtcatctggtgcggcaaacggcaatttgtcaatgataacacaacttaatgtgctgcctctaacatctacgccttcccaaaatgaggctgtgccgagtaaaacggcattaccgtgacgggtaaacttctcaaggataatgcgtttagacatttgcccttgcatataaaccggataatccatttgtgtggttaaaccttcagccactaagtgcatcatacgataactagtaaacagcacaaagcagcgaccttttgctgattttatcaactcaagggtcagcttgataattgcgtggggcatattattcgcatgagactcaggtaagtagcgcggtaagcaaagtagtgcttgttgttgataatcaaatggactttcaacaatcatactttgtgttggttttaagccaaggctagcgttaaagtgcgctaagtcgttatcgactgataaagtggccgatgtaaacacaaagccagctccagtgtctttcatcatttgtgcgaatttagccgatacattaagcggtgtaatgtttaccgttaggtatcggcgagtggtttcgtaccaataactatagcccgtttgtgcggtatcaaatacacgctctaactgacctttaaaggccagtgtacgctcaaatggatgctctattttttcgctacggtctaagcataactttaatacttggtataaaaagtcgaggtcgctaattactcggtgcagtgctgcacaaatctctttatcagccagcttttcacgccaatcaccacggctaccatcaaccccaaactgtaagcgtaaatctgccacgctggtttctaacttgttgagggttttacctaattgcagcatatccgggatatctgcacggtatattgctcgtaagtcattaattaaatccaccagctttttggtgctaacactttcaccaaaatagtcactggcaatttcactaagctgatgcgcctcatcaaaaatataggcgtctgccgtaggcattaattcagcaaaacccgtgtctttcacggccatatcagcaaaaaacaaatgatggttgatcaccaccacatcagcttccatggcgtttaagcgcgctttacgaatatagcaatcttgaaaatcggggcactctttacccaaacagttatcagcagttgagctaacataaggcagtactttggcatcttcttctatgcctatacaatctgctaaatcgccggaacgggtttcgcttgcaaactttgccaccatcgcgagttgatgcattacatcaggatcatcagttggcacatgcgcaacatgctgacttaaacgatacgtacacaaataatttgcgcggccttttaaaagggcgacttttttagtggcgctcagtgctttgactaagttgggtaaatcacggtgaaacaactgctcttgtagtgcttttgaacccgtagagatgatggttttgccttttgattttaacgcaggcgctaagtaagcataggttttacccgtgcctgtgcccgcctcaaccactaattggtgacgtttttttaaggcatcgtcaactgcaacagccatgtcaatttgtggctgccgaggagtatatccatcaagagaaagtgcaagagggcccgtggcactgaaaagttgtttgataaacttcgccaatagattaaaagtgatgggcagattttacgtaactgacttgccaagggcaagactaaatgaggaagcaaggcttcctcatggttaaaagtatgattgcgtttatatcattgtcctttaatcgttaatgtcacgcccgatgcagctcggtaaccttgtaaatctatgtaccaagtaccactttgtgggttatcaaattgacaactttcttcgttaccatttttgtaaggtcggcacagataatttgagcttgttgacgctgagccatagttaacatacaaatctgcatcgccactaccgccagtaatcgtcaccgttaaattactaaggcctgtgggtatttgttgagtaaagcgctgccaactaccggtagccacactcacgtttgtctcagttcgatcaacgttttcgctgccaccagaggtactgtagcttcccgtgagtgacacattcgaaatctcattccacgcttcgaccatgacatgataggtgccagtttgaactgacgacatcacacaactttcattacttgtagaggttgtgcttttacattcaaagtcttgtaaggtcggcctactgccaaatttaacgtataaatcggcatcgcccgagccgccctcggttacaaactcaaggttactgctcattgcaggtacttcaagcgtaaagaatagctgctcttttgctgcgcccgccaaacccgttttagctacgccattttcaagctgattagtcggctcagtcaccacatcaccggcattttttgccatttcagcaacataactcactgctagttttgcaaatttactcgcgtgagccgcatcaaactgggcatcatttgatgtgtggatcaatgggttaatatcactcattgttgattcaaatggcattgaggcggcaaacccttgttgataccaagaggcatgatctgagcagccataaccacattgatcaaagccatagctcactgtgggttgataagcatcgagcaactgcgatagatactgattttgcgatgagtttgtgtagtcggtcatcatcacaatatctgtgctgctgccgttattgccagtcatatcaaactgcaccatacctacaacattcttaccctgagttttataactctgagcaatatcttttgagcccctaagacccacttcttcagcggcaaaccccataatttgaatggttcgctgaggttggtagttattttctacaatcgcttttagggtttgtgtaagcaccgcaataccagaggcgttatcatctgcaccgggagcacggccattacttggatttgactgattaattgagtctaaatgaccaccaataatgacgatttcatctgctttttctgcaccaggaatggtcacaataactgatgattgagaaaagctatggttaaaatactcaacagttatatcactgcggctactggctatttgttgccaatggctctttaaccaatctgctgcatcaacaccactttgcactgcataatatcggttatgaaagttcatcatgctattaaccgtatcactcagttcactagtattaatcgaagatattagcgcgttaactgtcgcagcattattaatgctgtagttaacaaggctggcattcatcgcaatgttcgataccgcatttaattgctgggtataaagctctgcatctgctaaagaatcatgtgctacaaaaccaccacagcgatgatagttatcgtgcataaattcacttaatccagcgatatcctgcttgttaacgcgcataaaattaacttgatttaaagctgatttttgcatcgcaaaattgctgttttgtttacgtttactcactgtatcttgttgaaagtgctctgcagcaagggcatcaatggtgacccaaattgtttcatcttgcgctgcataacttaattggctcagtgacaatattgcaaagcccactaggcactgtgttaggcgggttgtcataatcaatccttttattatttgtattaataaaaaagggagccgaagctccctaaaagggtggctagttagccgaaatggtgagtgttacaccacttgcagcgctgtagccgcgaaggtcgatataccaagtacccgcttgtgggtttgtaaatgtgcaagtttcgctattgccatttttatatgggcggcaatcatagctagatgttgtcgattgcgaaccaaagttcacatacaagtcagcatcaccagacccaccagaaatagttacatcaagtgacgaataacccgcatctaggtcttgcgtgaaactagtccagctatttgtagcaacacttaagttagactcagtgcggttaatcggtgttacaccaccaccgctgccagaatcaaagctacctgtaagtgatacacctgaaatttgattccacgcttctaccattacgtagtaagtacccgcttgcacattactaatagcgcagctttctgtgctggtagatgaagtgcttttacaatcaaagttgctcagtgttggttttgcgccatacataacgtaaaggtctgcatcaccacttccgccagttgtattgaattgtaaattcgttgcacctgctggcacctcaagagtaaagaacatttgatctttagcagcaccactgatccctgtgcgtgcaacgccattggttagttcttcatcaccgcccggaggtggctcagtcgtaccacagctactacccgcacttaagcttgaagtcacaccgaccgctgcaagtgccgcttgtacatctgctgggtcataacttaaatcacaggctgcatccattacgccgttacctgctaaatcccagtttgtgctggctgtccagtaaagttgattagcacgtgccatcacaacgaacgccttttgcgtatcccaacctggtgtggttgcaaggttataaaatgccttgttgaatacacctgagctgtagtgcacatccatgcctgagtagtaactgttttgatgatcaatggagctgccatcttgggttgggttattcatgtaacgtaatgcaccgttacctttgaaaatttcctgacctactaaccagtcgtttgagcctttcatgtaaaactcagccgcttcacctgccatatcagagaacgcttcgttcaaaccaccggatttaccagaataaataagccctgagttttgctcagtaaaaccatggcttacttcatgcgctgacacatcaagacttaccagtggataaaacgtattttgaccatcaccaaaggtcatggcactgccatcccaaaacgcattttcgtagttattgccgtaatgaacgcgcattttcaattggaaagttaatggcgctgtgcctacccaatcgttatacatattaaaaataacgttaccgaaataatgcgcatcatttaaaggtgagtacgcaccgttaatttctttaaaggtattttcagggcatgtaaacgaatatgctgtagaaccactcgtacttccatttaagttaatggtttttacgttagcgttattcatcgtacaagtgttgccagactgggttacatctaggctatcaaagtcagtaccgtaaatgtatttaccggtttttaagttaccacctgggcctgttgcactagcatgttgtaagttatcgaagctgaataagacttcaccgctgttggcatcaataatttgatacggacgagatgggttatcaccataagtcacataagatacttcatacactaggtgtgcaacactatcttcatctagccaaatagctaaacgcgattgttcattatgcttttttaacccaactgatttaattgcagcaggtgagttagcaagacctttcgccattgcttttttcttgttaagagccggagagacagaatcgatgtcggcggcaatatcatataccgcagcaccatgtgcacgttttaattggccattaccatcaaatgtaaggctaaccgtatcgccaatgacaggtagaccttgatacatctgttgataacgacgagtggtgttgccgttactggttttgatttcttttaatacaactaaatcattccctgcacctaaaccaactaactgattaggatttgcactcaataccgatgacgcattggtttgcaaagcttggttaatccctgtttgttcgtttaggtatttcttgttcgcagctactgcacttgttgcttgagtcaaagcaaaagcagcaagagttgctaatgtgattttagataaattcacgtttacgctccgttagattgttatgtatttaatattttcctagtaaccggactgcactgttcccgattagtgaccagcctagattgaatggagcgaaattgaaaatgaaacaaaaaatttacaagtaaagtattagctctaatttaaaacactataattaacagcaagataagaattttcaggtttattaaatgttaacaaatacaactttaatgtaaatttattgatacaaaaagataacatttaataaacatttgtaccttttatttgtatttattttgctcaccttaccatttgtgattcaccgctaaaaattcagctattaaccaaaaagcctaggtacataacttgcagctatcgcaagtatctagggtttaaggactaagtatgattactgaactaatacaaaatgaatggctaaatgagccttggctggtcgtcattggcggcactgtactagccgccataaccctgtttttattaaagtttgtaattatctattgcctaaaaaaatggacccaacgaactgattttgtgttcgataccttgctggttaactcactttctacgccattgaccttgtgcacaatgatggtgcttgtgatcatttttggtcagttattaaacatcaccggctttatggccgaacaccccttacctattgcagccaccgctaaagccatttgtatttttgccttagtgttatttttagaccatttcttatttggcaccgttgattattacattgcccgttcagtggtggtttcgaatagtcatagcatcattaaaggcttgatccgctgcgccatagtctgtattggcttattggtgttattgggcacgttagggatttcaatcactccgattattgcctctttgggcattacctcacttgctgttgctttggctttgcaacctacacttgaaaacttcttttcaggcgttcagttggtgattgataaacctattcgggttggcgactttatagaacttgaaagtggcgaccaaggttttgttgaaaaaattggttggcgctctacatgggtaaaaatgttgccgaataacatgatagtcatcccaaatagtcagctgtctaaatcacgcatcattaattacttttatcccgaaaaagaactcagcgtccccgttgaggtgggtgttcattatggctcagatcttgaaaaagttgagcaagtgactttggatgttgccagacagattttaaaaagtcatcaatggggtgttgatgactacgatacttttgtggtgtttcacacctttgatcaatcaagtattaattttacggtgatgctaagagcaaaagagtacttcaaccgattttgggttaaatcagcgtttataaaagcactccataaacgttacgccgaagaaggcattgtgatcccttatccaatcaggtctataaataccagtcaagaatctgcccagttcaacaaattgacctaactaaacttatcaatgctacatattttgcagggctttttatgtctctttttagacatttttaacagcaattatacatatgcaatcagcatcaagtatttttactctaaaaagtcataaaaatcgcataaacactgtgacatacctatattagaggcgtactatatgcggccagaaagtgacagctttctgcgtcttgttataaaaatatttaaggtcaaacaatgaatgcttggtacctcatttgttttctttcagcattagctatttttattgcttttgctaatcaatatatcctcaaaatgcaaaccacgattgctataacaactggctctgttgttatttctttgctacttattcttgccgttaaaatgcttggtgatacaacggccctcgaaataactcagattgtttctagtatcaactttaatcagttgctattaaaaggcatgcttgggtttttgctattcgcaggggcattggaaatcaacttggcagcccttcgtaaacaacgatgggagataactgcattagtgctattttcaaccataacctccacggtcatagtcggttatttaagttattacttatttgcctttgttggctggccagtgccgtttatttattgcttgctatttggagcattaataagcccaaccgatccgattgccgtgttagccattattaaacaaatgcgagccccagaaggaatttctgtgcaagttgaaggtgagtctttgtttaatgatggtattggcttagtcatattcaccaccatattttcagtggccttttatggcaccgaagccacttttgctgatgttgccgaactgttcttagtggatgccattggcggtattgtgtttggtttagtcattgcattggttgggcactttttgatcatcaatagccgcgatgtgaatattcggttacttctaactttgaccatcccaaccgctggttttgctgcggcaaatatatgggaaatatcgggcgcacttgccatggttaccagtggtattttgcttggcaatattacccgctcaaaggcaacagagcgcacagggcctgaagatacccgttatgtaaaagacttttggcatgccaccgatagttttttaaacgccttgctgtttttgatcatcggtatgctcatcgtgactatgcctattacctttgaagaaatcggtttaggtctactcatggtgcctgtggtgttattagcgcgttttataagtgtaggtgcgccatttgtattctttaaaaagtatcgtcaatacgataaacactcggtaaaaatcttaacttggggcggcctgcgtggtggattagcactagcaatggctgcagctatacctcgtgatcaagtgatgattgcagggtctgacttgcatgacctaatagtaatagtgacttatgtagttgtgattttttcgattattgtacaaggcttaacaatctcaccattgatccaaagcagtattcaatctgctaaaacgcaacagtgagtatgccattagtcattaaaaaggctcataattgagcctttttttgtacctttgcgttatacattctactatcagcaacagctaatagctttgcaagtgaacagggttgctggcccgaaaaatcagcaattccataagaaaaactcaatatgctttgacctgtaaaactcgaaggtaaattacaaaatgactgcagtagacgttgcatgattgtttcgcattctgaggtgtttaaatcagtaaacagaatcacgaactcatccccactcaaacgtgcatataagtctgcttttcggcagtattcttttagtaatgatgcaaattctttcagaactctatcaccagcagaatgcccaaagttatcattaatgtatttgaagttatctaaatctataaataccaatttggcatttaattgctgcctaatacacaaatctaaataatgctcagcagtgcttgtaaaacctcgacgattagggagcaaggtcaattcgtccattgtagcaagttgcaatatggaaaattcacgctcaataattgcagcaaaatctttcagcgcttgaagatttttattactcaatgtgcgtggtttatagtcaataatacacagtgttccaatacaattacctgatttaaggatgattgggcatcccgcataaaagcgaatatgtggctctccaactactagcggattatctgcaaaccttttgtctttcaacgcatcattaatcacaaaaggttcgtcttgtaggattgcatggccacaaaaagagatatctcgggcagtttcagtgacatttaaaccaacacaagacttaaaccactgacgttgctcatcaactaaacttatgatgcaaattggcactgaaaagaattgctgagcaaggcgtgtgattctgtcgaaaacaggttctctttgcgtatctaatatttcaagcgaacgcaattcgtcaaggcgagcttgctcattcaatggcactgcaggtttatccattaatctgccctgtaaaatataaatgaacttacttaaacgttagcagaaattgcgcaactgttgcagaaaaatttggctttcgtttaagcccaggtatctaggtgcttattaccctcttcatcttcttcaatagcatttttactgtttttatcgccattttcagcagcttttttacgtcgttcaatttcacgtttttgccgtttttcgagttcaattcgctgcacgttcgcgtcttttacgcccgcaatatgaaacgcgcctttactctccaactgtaagcgcgttatgcgacctaaaaaggggatcatgatatccatttgtacctcctatcactccatttattatcggcagttatagcatatactttaatttagaaaaaaaatgcttgccaaagattagcaaagcatgtttatctatatacgtaaattatttaaacagatatacgcactggtttacataaacgagtgcaatacaggaaaaattatgcgtttcaatctgacaactatccatcatcaccatcattcaccggaatagcctgtcaggtttttcgctgagaggttattcctaaaaggaacctctggcgagcaatcaaccaaattatttattttcgccctgaggttccctcggggtttttagtttttgaattaaaggaaaataaataatgagcaataccaatcgtttacgaatcgccatccaaaaaggtggccgcttatcaaaagactgccaagaattacttaagcaattaggcgttaaattaaaccttcgtgaacaacgtttaatcgcacactctaccaacatgccaattgatgtacttcgtgtacgcgatgacgatattccgggcctagtaatggacggtgtgtgtgacctaggtatcgttggcgaaaacgtacttgttgaagtacaagccgaacgcgaacgccaaggcgcagcattcgaagtaaataaactttctaaacttgatttcggttactgccgcctagcacttgcatggccacaagaacttggtccgcaagataaaagctggtttgaaggtaaacgcattgccactacctacccagaaatcttgagccagtacctaaaacgcgaaggcattaacgcaagcacggtaatgttaacgggttctgttgaagtagccccgcgtgcaggtttagctgatgcaatctgtgatttagtgtctactggtgcaacattagaagcaaacggcctaatgcaaggcgagaccatcttagaatcaaacgcatgtttaattcaaaacaaagaccttaaagaccaaagtaaacttgatttaatcaatacgctaatgccgcgtctacgtggtgttcgtcaagctaaagaaagtaaatacattatgttacacgcaccaaaagcaaagcttgatgaagtgtgcgatttactaccaggtactggccagccaacattgttagcacttgctggtagcgacgattacgtagcactgcacatggttagcagcgaaactctattttgggaaacaatggaacagttaaaagcactgggtgctaactcaatccttgttatgccaattgaaaaaatgatggagtaataatccatgtttcgctggaatgaggaaaatcaacaagcacagcaggcggtactcacccgccctgctgttactgcaagtaaagaggtcgaagcaatttgcatcgacatcttaaatgcagttaaaaccgaaggtgacgctgcgttgttaaagatggctaaagagtttgataagcgcaagacaccacgtttattagtgccagttgaagaaattaatcaagctgagcagttattatcaaacgagttaaaagccgccatcgaaacggcctatgctaatgtaaaacgctttcaccaagcacaattacctaaagacattaagttaacaacgcaacctggtgtgttatgtgaacttaaatatcaagccattgaagcggtgggtatttacgtgccaggtggcagtgcaccattgccatcatcagtgatcatgcaaggagtgcttgcacaattaagcggtgcacaaactgttgtgcttactacacctgtaaaagccgatgaaaccatcaaccctgccattttatatgctgcaaaactatgtggtattaaaaccattgtagaaagtggtggcgccggagcgattgcagcaatggcatacggcacagagtcagtgcctaaagtgaacaaaatttttggcccgggaaatagctttgtcaccatggcaaaacaacttgttgcgcaaaccattccgggcatggcgattgatatgcctgcgggcccttctgaagtgttagtgattgcagatgagcgtgcaaacccagagtttattgcggcagatttattatcgcaagcagagcacggtgccgattcgcaggttattttactgtgtaacagcgaacgtattattgaaaaaacacagcaagctttaactgagcagctagcaaaattaagtcgtaaagacactgccgagcaagcgcttgcaaactcaagcttgatattagtggactcggttgagcaagcctttgcggtgtctgctcaatatggtcctgagcaccttattttacaacttgctgatgcgcagccttatttaaacttagtgagaaatgctggctcagtatttgtaggcgattacaccccagagtctgccggtgactatgcgtctggcacgaatcacgtactaccaacgtatggttacagtgcgacctattcgagcttaaacttactggacttctttagaacttacacagtacaaaccatcagcaaaaatggtttacgtgaattatctaaagcaattttacctttggccgcagcagaggggcttgatgctcacgctaatgctgtttcaattcgtcttgaggctatgaacaatgagcgataattcaaaaataacaacgctgttgccagataacattgcagcgcttacagcctatagttcagcgaaaagtgaaaaactaacaggcacaacgtggttaaatgccaatgaaagcccgtattcacgtacgccaaatatcaatttaactgatttaaatcgctaccctgatccgcagcctcagcaagtgatcactcgttacgcttgctatgctaatttagagccagagcaagtactgatgactcgtggcgctgacgaaggtattgagctattagtacgtactttttgtagccctgctaaagatagcattgcactctttttgccaacttacggcatgtacaaagtcactgctgatacccacaacattgcgattaacggtttaactcaagagctgttattaaaaggcaccgttgatgagattgtcactgcggttgctgattcaaagctggtgtttatttgtaatccaaataaccctaccggcagcatgacaagcctagacaaaatcagaaaaatcacccaacaacttgcgggtaaagcgattgtggtggtggatgaagcttatatagaattttgccctgaacaaacagcagcaagcctgatcaacgagtttagtaaccttgtggtacttagaaccttatcaaaagcatttgcacttgcgggtttaagaacaggcttcactttagccaacagcgaattacttgcgcctattcgtaaagtgattgcgccttatcctgtatcaacggtggttgctagcattgcagcagatgcattaagtagtgacaacatcgtttcaatgcgccgtcaggtgactattctaaatagcttaaaaggcaaactgaaaagctggcttgagcagtcaccagccgttatcaaagtcctgagcggtgaaggtaactttgtcaccttaaaattaaaagacaaacaatcatttaatatcgcactagagcaagggcttgtgatgcgtgccttcaccttatatggcgaaaatgattggttacgaatttctatcggtaacgagcaagaactagaacaagtaaaaatttggttagatggcttatcactgaccagcaatacagtagaacaggaattatcatgagcaacccgtatttatttattgaccgcgatggcacgattatcgaagagcctatcaccgacaaacaggttgatagcctcgaaaaattagtttttttgccaaatgtgatccctgctctgttacaacttcaagcggcaggttaccgccttgtgatggtttcaaaccaagatggtttaggcactgatagcttcccgacagctgattttgatattgctcaagacaagatgatgaatatcttaaacagccaagggattaaatttgatgaagttctgatttgccctcactttgatgagcaaaattgtgaatgccgtaaaccaaaaaccggcttacttacagagcttatgcggtcaggtaaagtcgatttagcacgctcatttgtgattggcgaccgccaaactgatattggacttgccaataacttatgttgtgaaggtattttgtatgacggcagctgggatgccattgtcactaaactgacaaccgcgaaccgtgaaggccgtgtcactcgcaacaccaaagaaacgcaaatcgatgtgcaaattaatttagaccaaacaaaaaatggcgaaattagcactggtcttggctttttcgatcacatgcttgaccaaattcgcactcatgccaatatcggacttaatattcaagccactggcgacttacacattgacgagcatcaccttgttgaagatatcggtattgcgcttggcctagcccttaaacaagccctaggtacaaaaacgcaaattggtcgctatggttttgcattacctatggatgaatgtaaagcagaagcgcaaattgatttatcaggccgcgcctcatttgtattaaatgctgattttagccgtgaaaaagtgggcgacttagatgtacaaatggttgagcacttctttaaaagcttaagtgataatgccgccatgagcctaattctgtcggttagcgacggtaactgtcaccaccaagttgaaggcctatttaaagcgtttgcaagagcacttcgtgctgcgattgcaaaagatgcttcgcaacaaaccgccagctctaaggggtgtttatgattgccataattaataccggttgtgccaacattaactctgttcgctttgcctttgaacgcttaggtgaaaagccagaggtgatcacctcacctgaacaactaaaaggctttgaacgtgcgattttacctggtgtaggccatgcttccgttgcaatgaaacgcttaaaagacggtggttggcagcaagcaattgatgaatatcaacgcccgctgatgggaatttgtttaggcatgcaattactttgtgatagcacagaagaaggcaatgtcgattgccttggcaaaattccgggtgttgttaagcacttagatgtgggtacattaacttctccacacatggggtggaacgacctaagcgtactaaaagagcatgcccttaccaaagggttatcggcgcaggatcaagtgtactttgtgcatagctttgctcacacagtgaacgatgcaaccctagtaagcggtgaatacgggcaagctttttcagcaattgttgccaaagataactacgcaggcatgcagttccacccagagcgaagcgccaaagtaggcacacgacttttacaaaactttttagattggcagctgtaagcgcagcaaaaaataagagaaataaacgtgattattccagcactcgatgtattacaaaaccaaattgtgcgcttataccaaggtaagtatgatacagcacaattttacccttacgaacttggcgcacgcttacaagagtacgcaagcagcggcgcaggcaaactgcacctagttgatttagaaggcgcgcgcgatccaaataaaaaacaatggcagcatattcaagccgcaaccaaagcgcttaatgtaccttatcaagtgggcggcggtattcgctctgagcaagatgttgctgactggcttgaagccggtgctaaccaagttgtaataggctcaatggccgttgaaaagcgtgagcaagtgcaggcgtggattgaaaaatttggcagcgaacactttgttatcgcactagatgttaataaaactgacaacggctgggcaccagcaacacatggttggttaagtgaatctgagtttggcttgttcgaacttgttgatttttacgtggcacttggtgtggttgattttctgtgtactgacatcagtaaagacggcaccatgaccggcccttcgtttgcactttatgaagatttaaccaaccacaacagcgagattaaagttcaagcatcaggcggtgtaagctctcttgatgatatcgcaaagctgaaaaaactaggcgttggcggtgttatattaggtaaatcattgctcgatggtgcctttaatgttgaggaggcgttagcatgttatcaaaacgcataatcccttgtttagatgtaaaagacggccaagttgttaaaggcgttaaatttaaaggccatgaagtagttggtgatattttaacgcttgccaaggcttacagcgatgctggtgcggatgaactggtgttttatgaaatcagtgccagcgtcgaaaaacgcctacttgatgtcaattgggtagagaacattgcacgccacattgatattccattttgtgtggctggcggtattaaatctgttgccgatgcagcacgtgttttagaacgtggtgcagataaaatcagtattaacagccctgctatcgcgcgccctgagcttatcaaagagttacacgatgagtttggtaaacagtgcgtggttgtgggaatagatagcttttatgatgaaaacactggcgagtatttagtctaccagctaactggcgacccaaatgcatcaagccgtactcgctataaaaccgaagaatgggttaagcgtgtgcaagacctaggtgctggtgaaatcgtgctgaattgcatgaaccaagacggcgtgcgtaaaggctacgacaatgttcagctatcaaaaatgcgtgcactgtgcgatattccactgattgcttcgggtggcgcagggacgatgcaagactttgttgatgtatttcagcaaagccaagttgatggcgcgctcgctgccagcgtatttcacaagaacgtcattgatattggcgaactaaaacaatttttaatcgataataatgtagcggcaagactatgcaattaaccaaagacactctttctcaagtcgactttgccaaaagcgaattgatcccagctatcgtgcaagacgcacgctctggggtgattttaatgcaaggctttatgaatcaagacgcattagctgccactttcgacaaacaaaaagtaaccttttactcgcgttctaaagagcgcttatggacgaaaggcgaaacatcagaaaactaccttgaagtagtttctgtacacaccgattgtgattacgactcactattagtactggcaaacccacttgggccaacatgccacttaggtacacaaagctgcttcggcgatgatgctaaacctagcttgtcgtttttagctgagcttgaacaagtgattgtctcgcgtaaagacgatgatccaagcaaaagctacactgcgtctttatttgcaaaagacttaagccgtagttgccaaaaagtaggtgaagaaggtgtcgaagttgcccttgcagccatgaaacatgataacgatgaattaaccaatgaatcggcagacttactgtatcacttaaccgtgttattacagcgccaaggtttatcattggctgatgtggtgagctgtttacaaggccgccataagtaattgaaattgattaagatgcaccttttcaggtgcatctttttagtgtttcttaaatccaattttatctacccagagcttttagaacatcacgagtaaagtcatgttcactaaagcctttaagacccgcaaggtcataccctcgcctaacaataactagctgctcgcttggaataatcaccaaatattgaccacggttgcctcgcgcagcaatagtatcgtttggtaattcagggaaacgttcgttataaagccaccactgtgcgccgtatcccggtgccgtttcttggggttgagcaggggctggttcactaatataacttaaccagtcttttggtaatatttgctccccttgccagcgaccattgttcaagtgtaatagccctaagcgagcaagatcccttgaagtagtccacacttgcgatgacaaaataaagtcactttgccaatctgactctaaaaatgtgtgctgcattccgattttatcgagtaaattgtcatacggataacgcaaatagctcgcctcatcgttgaacgtttctcgtaaggtgcgtagcgctaacatggtgtcgttattcgcgtatttccagcggctacctggctttacttctaatgcggtatgcgttgcagtatcagacactaaaccgccgcccatatacacacggtctgtccggttgcccgctttattactgtctaagcctgatgccatgtgaagcaagttttcaagggtaatttcgccacgtgggtcaagcgggtgagaccagctttcaagccccgcaggcttagtaacatcaagtcgcttttgctgtaccgcaacaccaatgatgctcgcgccaatactttttgcaacagaccaagtacgctgtgcggtttctggggtaaagcctgctttatattgctctgctaaaaccgcctgagggcttgctattaaaatagctgaagtgcgtgcgccttcaccataatgactagtaaaagcctgagcaataacctcatcaagcgccttattactcgttgctttattaacaccatttagcgttagccaaggcttaccgtcatccttttggtcggctaagttttctttgaacggcgcttgcacaagtgatgtagctttaaggcttgcccctactggcaaatcaacacaacctaaacgaggacgccacaccgatatgcgttgcttatctttatcgtaatcaacaatgactcgtttatgctcgttatcaatgttcgctttcaatgtttttacagtatctgcaattaaagggtaaataccggttagttcatcaatatcgatttgatctttgcttttgcccgcgttaaaggtggcactacaggtaaagttggcgacgtacccagcggcataagcgtttaaagttgtatctgtttcttcgctacaaacaaaaaagctggtgctcaataacgcgcttaggaaggttatttttttcattattactccttgaagaccaaagagtttaaattagcaaaagaaaaaaataatggtatatttttacggcagtattcgctccttgagcgacaaataacccaacaaaataggttcattgttaataaacaaaatgaatttagagtccgaagctcctgttgtctacgcaactttttttctatttgtgtaaaaattttttaaagcctttaaaccttttttatcagcacttgcgactaagctaataacaccacacatatgaaagggaagaaccatgttaagtacagtaaaaacgctttcactaattgccgcaggcttattatcagcacaaacatttgcttggggtgatatgcctctacaagcaactaaaaacctaacgctagatgcagcatcattaagtgctttaaaagtagaagcgggctcaggttttttacacattaccggtagtgacagtgatcaagtgaccgttaaagccgagatttatcaagagcagccacatgatgaatattgcttaacgcttgaagctaaaggtaagagtgcagcgctaagtgcaggtcaatgtgaatatcataccaacaagcaaactcgcattgatttaaccgttgcgatccctcgctcatttaatgtcgatgtgcacgatggctcaggtgaaattatcattagcaaagttgcgaataccgttataaacgatggttctggttcaattaccgcaaatgacattgaaggcacattagaaatcaatgatggttcaggcagcatagatgttcgtaatgttagccgtgatattaaaattcatgatggctctggcaatattgatgttgcaaacgcactgggcaatattgaagtacacgatggctctggtggtatcgacttaaatgatatttcgggtgatgttgtcgtttcagatggttcgggaagcattcgcgttgatactgcggcaaactttgagttactaagtgatggttctggctcagtaaaagtaaccaacattgctggtaaaactaagatgtaagcttacgcttttattaatatacgcaactaaaatgccttcctttgcgagggcattttaaattgtaatcaccaatctttattagcatttttacaagggcttaggtatcctttaggaaacgtttaaggaactgctatttaaaaggatagcctgatatgaaaaagccactcgccgccttactaactggccttgtattaacaggttgtacaggactgacaactgaacaacaagcagccattgataacttaaccccttgcgagaaaatcaatgccctattaggtgcttacgacaaccgctttgaaggcttaaaacgtagccgtgtaaatactaagtacatggaaacatggacagcaaaatacaacctaattgccgataactgtcaaatcacggcgcttgataaagacaatgttacctaccgctgtgtaggcaactatgagcaacagcagcaagctgtcgccgatcacacccgtgcggttaattttacccaagcttgtttagcaggaaataattggcatcaaacacaaaaagagtcagctgaatcgttacgcacaacctttgtacttgacgaaaatacccctgttatctcaattcattcgggtaaaactctatcgcgtaaacagccttggtctactacccttgaaattggtaagcctgttgaaggtaagtaatacacttaggaaggctaatagacattagccttcgtatctctatggcacattcaaaaaaaccaaccagcgaatttaaaacagattgcatcggtcaatgtcatcgcctcaatggctattgcactggctgtggtcgcagtaatgatgaaatttttgattggatcattttatccgaacaagaaaagcaagcgattttaaatactcctcgccctgacataaaagcgaaatagttctgacacccaagcgtcattaaagcttgttagcctgattcaaactgacccatcaggtaacaataatgaccgctatttttgtaattaacttagcaagctctacagaacgattacaccgtgtgagcaatgaactcaacgcgcaaggtttaacatttgaacgtattgatgcaattgatggtagagagctgtccgatacagcgattgctgagcattataatgctgatttaaatctaaaaaaataccataaaccattgagtaaaggtgaaattggctgttacctgagtcacagaaaagcatggcaaaccatggtcgataggcagttagattacgccattattttagaagatgactttgttctcgaccgctctattcacagtgcaattgaaaacattaatacattaaaacagccttggcagctaataaaattggccgcttataaagaccgaaatcgggaaattgcctttacaaaacccctcgctgatgagcagcatttagtcattcataaaaagcttatgtctggctgctgtgcaacggctgttagtttagctggtgcaaaagcgctattaaaagccactgcttcatttggccgccctgtcgactgtgatttacagcacgtttgggaaactggcgtatatggatactctttactgccctacccggtatcacaacctgataattcacaaagcgatattcgtgatagatcagacaaagttaaaaagtcgttttggcgacgtaaaaagcagcaacttaatagtgcactgctaaatgcaaaatacactaagcagtttatcaaggcgcaacaaacgccgaataaaaagaaaggagccgcagctcctctcttaccaattaaagatcattaactattttgctaggtttggatggtcaacgcccatccacgctttaaacagtgccatttgagctggtgttgcatcttttaatgcttttacctttttctctttatcaaagtcttcgctcagtgttagctttgtgctttgcagtgcatcacgtctaataaaatcaacagtcactgtgtcgcctgctttaaacgtttcaaggctggctgttaagtctttaccaacatgctttttgttaaacgcaacgattttatcatctgtagttaagcctgcttgccatgcagcgccaccacgacgaacatgagttagggttaataactcaccgctgtttttagcaaacgagtcaatactaggtactgatttagcatcttcagggcgaattaaacctaagcccactttttcaagtagcgaatcaaagtcgatagctgctggctcatccacattcgcttgccaccaagcactgtaatcacgacctgtaagttcttttaaaatcgctttaacatcatcaggcgtaaaaccatcaggtaaacgatgcttgttgtacagttcacggtgaacatcgcggtaactgattttgccatcgcttttttcaagtaaatcaatatcaagcgccattgagatcaatgaaccttctaaatagatattggtgctgtagttgcgagcgtggtcaccgccttggttgatccacttatcaaaactggtttcggttgcgctttgcacttcgcgacccggtgtttgtaagtgacgattaatcgttttcgttaacgtaccgaaaaactcatcggttgtttcaattccagagcgaaccattaagtgatcttcaaagtagctggttgagccctctgcaatccataatgttttagcgtagttaatattggtgtaatcgtatggagcaataccttttggacggtatgctttaacgttccaagtatgaataaattcgtgagctgcagtgctgataaacgcaaggtagtctttacgagaaccaaaacggtcacgtgggcgctggataatagtagagtttaaatgctctgttgcgccaccggcgccagacgtagcatggaccataaatacatagcgctcatatgggtaaccgtcccaaattacattgccagttgtcactagctttttaaggtcagttagcatttgatctacgtcgtagttgccatcgccccaaataactaattcgtattcacggccatcaacggtgaacttgtgtagctcattgataccactttcgattggtgaatcaactaaaatgtcgtaatcagcggctttaaagctgtgtttagagcccgcattttccatacccgatactgagcgccattgttttggtacgtttaattttacggttaccgggtcttggcggaatgattcactaaacatgaaaaagccagatgcatcaacaaatgcatggctgtcatcaatatgacgagcgcgtttacctagctcgttagcgtaaacttggtaatctacattgacttgagttggctcgtttaggtgaacacgccacgtgctgtgatcaattttttcccactttaatggcttgccgtcatcatcttttgcttcgaaaaaacgtacgccattagcaagattcaaaatttcataacgaccagtacgccaagcgggaagtttaacatctaaatgtgcttgtgcagtttcaggaaactcaacactcacattacctaaatgatgctctggctcagtaatcgacagtgaatagtttacatctgcaaacacactgcttgagcacgctgccaaaattgacagtgccaaaaactttttcataacaactctttttattacttttaaaattgcggacaagcctaacaattgcgagaaaaaatgtgaattaaaaaccgataaacagccattgcaacaggtttgatatacaaattaactaagtttttgacttggaacctacatttcgtattaatttgttgtaaacttaccctatagaaaatttgaatcttgacggcggtattactaggtgcagcaacagcatgatgttcttaataaaaagttaaagcaggctatcgacgcacgcacagtggtcgaagatgcacgcaaacatcaagttgaagtgctttcacagtttgcggcaaaactgtcgctcagctgtaaagggctagacattgagctagataaccgtttagccaaatttagaaacgcactaaaaaaaggtgttaattttgaattactaacacctttcatagatgatgtacttggtcttctaaaacaacaagaaaccaagcaaatggctcaacaacgcgagcttaacaaaagtatcactgatgcaggtaaacaattacaaaaagtccaaggtttacctgataatgcccgtcgaacattgcgttatctgcttgaccacgaattgaataatatacagtctaatcatgactttatacctttattgtctaagctggttactatttatcaccaagcacttcaagcaaagctcgctaaaagtagtcaagccgaggcattaatcaaacctgagttagcgtctgagctgctgtctcttgctaatgagcttgtgctcgaggatgaaagtgcagagcaaataaatataattaaaagcaaaatcactcataatgacagtgttgacgatttacttgattctgcgctgagtattatcaccatcattacgcgtaatatgagtaaagagcgtcaatctgcacaaagctttttaatctcattaaatcaaactattgaagatttacatcactctattgtttcaaccagtaaacactcagagtcgattagcgcagaatacgattccctgaacaaacagattgaagcaaaaattaagaatcttcatacgcaaactcaacaggctacctcaataacatcacttaaagaattagtagaagaagaacttaaatctttaagtgatgatttaattgccaaagaaaaactagagcaaacggagcgagaaaacttgctcgctagctttaacgatatcaatagccgtattagccatttagaagctaaactttcaacttataaacaacgcttaaatgaacagcgatttaaaagtttgctcgatggtttaacaaaattacccaaccgcgcagcgtttgatgaacggtttaatcaagagtttcaattatttgatctacaagagtcggcagtgacatttgtagtaattgatgtagaccattttaaatcaatcaatgaccaatatggccacagtgccggtgacaaaacattacaagtcattgctaaagcactacaaaaatcaatacgtaaatcagactttattgcccgttacggtggcgaagagtttgtgttactaatgagtggtatgtcacttgaaagtgcagcagcaccacttgaaaagttgcgtaagacaattcagggtattccatttaaattcaaagataagcaagtagaaatcaccatttctgctggcgcaacccagttgaaaaaaggtgataccccactgattgcctttgaccgtgcagacgaagcactatacaaagccaagaacgagggacgaaataaagtttgcattagcaaataaaggcctcatcttgttagtaaggtctttgacacacaatgataaaggctcattgacgagccaggagagtgcttatgttaaaacaactgaatcctacaggtgtactggatttactatcgcaactagaagttgatctactcgaacaatcatccaccagcgagcgctataaattatttaggaactgtgtgctcgcggttcttaatgtgggtagccacactgactcaagctctgaaatttacaacaaatacgaaaatttcgatattcgcttattgagccgcgaacgcgggattaaaattgagcttgaaaacccacccgaatcagcctttgtcgatggcgaaattatcaccggtattcatgaacatatcttctcggttattcgcgatattctatttatttgtcaaaaatacgaaaaagatttaactgagcaaaaagccataactcatatggtgtttgacatgctcaggaatgcaggtgcgctaagagtaaatagcgatccgagcatgatagtttgctggggtggccactctataaacgaagtcgaatacaaatacaccaagcaagttggctatgagcttgggcttcgtggcttaaacatttgtacaggttgtggcccaggtgcaatgaaaggcccaatgaaaggcgcgacgataggccatgccaaacagcgtattactaataatcgttatttaggtttaactgaaccaagtattattgccgctgagccacctaacccaattgtaaacgaattagtgattttgcctgatatcgaaaaacgtttagaggcgtttatccgtacagcccatggcattattattttcccaggtggcgcgggtaccgcagaagagctgttatatcttttaggtattttactgcaccctgaaaacgaaaaacaatctttacctgtgatcttaactggccctagagagagtgaaaattactttattgagctgtgtaaattcgttgagaaaacgcttggtaaagaggcacttgataagtttgaagtgatcatcgatgacccagagcgagttggcaaaacactcaaatcaaaaatggctgaagtgcgtgaataccgcaagagtcaaggtgatgcatactactttaactggacgctaaaaatcgataatgattttcaacagccgtttgcaccgactcatgccaatatggcgagtttggatttacacttagatcagccgactcagcaactagccgctaatttacgccgtgcgttttcaggtattgtggctggtaatgttaaagacgaaggcttgcaagccatcaagcaacatggccgatttgtattaagtggtgagcctgcattaatggctgatatggataaactacttgctgcttttgttgagcaagggcgaatgaaattacccggtagtaagtatattccttgctatgagataaatgcttaacaggagactatgtgacaacccagttacttttaatagatgcgttaaatcttattaggcgcatctatgctgttgatagtaatcagagtcatcacagtgaagaacatatgataaaggcaagctgtgcccgcgtggcacatgcttgtaaaaagttacgtcagcaaactaatgctactcacgcgattgctgtgtttgatggtgaaaaaagctggcgttatcactactatgaggcgtacaaaagcactcgctcaccgatgccagataccctaaaacaaaacttatcgctttttaaacaagccattgaacaaacaggcattgtggtgttttcacctaacaatgatgaagctgacgatataattgccacgctggcacataaagccgcgactaatgatgtaccttctactatcgtttctacagataaagggtttttaccatttttatctgagcagattgctatttatgattacttcaaaaaacagtatcttgaagccgacgacattaaacagcgctttaatgttccaaaacatcgactcgctgatttttgggctttagctggtgataaaaccaatgacatacccggcgtgaaaggtattggtaacaaaactgcgcagcaattagtaaatgagtatgagtcaattgcagccgcaatcaacgacgatgaactaaacccttcagtaaagcgtaaattgaacgatgagatggatatgtttgttatttcgaaaaatcttgtgatgttacgcacagatattcacttaggctttagtttaaagcagttaaggctcaattaatcgcaatctcgtagcgcacttggatatcacagcgtatactgcaaattcgcgttaattttaaagagttacacatgtttaaaaaggttttccaatatctggtgctgggtttaggtgtttatgcacttatcgccactcttgtgatcactttttataaagatgatccacaagccatgatctggcaagaccgtgaagcttttaataaacgttacatctcgaaactatctatcgataagcctgaaaacttaaacgccgtacttgattacttaggcagcccagacctaacctatgctaaacgagtcgaagacaatgtttggcaaatcattttttaccgtacgcaacacgtaaaatcggatggtattacaacaatagatgagtgcactggcttgctgtttaaaaatggtcaattagtattgtgggggccaagtgcctatgaaagctatcaacaagaaacctaaccgcttatgatggaaaacgtgacgcctcgtgagttggcacgcttatttgatagtacgcaccagttgctcaagctttattatcaaaagcagaaatggtcgcaaatttatcctttattaagcaaccttgctgagcgatattacttaatctaccaagcctgcccaaaaggtatgcaagcgcaacttagcttatatgttcctaatcatggctacacaacaaatttagttgttaaccaatgcgttattgcttgcattctatgtcgtagcctaaattacaaccaagcaattagtgaacaaattattagctgctgtttagctaattacctgtgcgtacaaactcaaagcaataagttagctgcctgtgaaaagctaacattacaagataaaaaactttggcagagtcgtcaccagcttgctgcaaaattactgcaaagctcaggtcctcatacattatctattcagcatttattagcgcggttaaataaatacaaacaagcacttttaagtgcgccaaaaattatgatttatgacggagcaacaacacttgtagctttagctaacattatcgccatgaataccacttatcgtgaatctggtgggcatattagtatacataaagcattggctgatatttatcttcgtacacctaatgagtttgctcaaaatgcaataaaggcgctcattgcgcacataggcccatacattccagcaagtgaagtaaattacgctgaacgcattcttatctatttaaccaccgatgagcaaggtaggcatattttagtcgatgctagccgcccagaaaaagtacgctggcatcgcatcaaagctaatttgagcattttagacaaacaaagaacatgtaaagacacgcgtttgctctacaccgtatggtttagtgagaacatcaattttacagaaccaccacctataaatcagcaacgcagacagcaatacttagcattaattagtgacttaaaagtatcaaaagaatacagctatcgtggtttaaataagctgttaagtccctaccctgaattaattacgcaacttacaattgccgctaagccctataataaagagcagcaaagagccaaagacttgcgtcattgtttatcgatggttggatacgacaatgcaccggcaatcattcagaaagtattatttcaacgcttagtagcaacaactactcacccactgtttcagcatatttctaaacgacttgaaaatatggtgcggattattcaagcattgtttaaacactctgactcagtgcaatttgaacacgtgagcttgccattatatgcctacgttttatacctttgcgaatatcaagctacgagcctgtctcgaaaaactatatttgaacaagccgaagagcatgttattagcccaccattggcctgcctatttggtgttaatcacctagatcaagccccattaactgaatatttaaatcagctaattggtgacaacgtctggactcaacatttactggctagtgaacaacacaaaaaacagcaactcaccataaatgagaaacattggatagctattaaattatttacttattatgtttttcaaccaaaagctttatttagcagctggcaagagcaaatcattttcgacagcctatcggctgctggttgggactcaaaagctaatttttatgcatatttgaaaaattgcgagtttgcagacaatttttagaatgtgttgttaaaaagtgcgaaaacgttaaataaatatgaactttagtctgtttatagtcagtattcacaggataaactggtaaaaagctgaataaattgctataaaagccgcttaaattttcaaacacatccacgtaaaccttctaacaagtaaatcgcatgctatttcgcgacgagtttacgtgtttatctactcataaataggaaaagtaaatggctaaacaaaccatcacagtgatcaaaggcgacggcattggtcctagcattattgattcagcacttgagatccttgaagctgcaggttgcgattttgattatgaattcgttgatgctggccttgctgccctagaaaaaactggtgagttacttccgcaagaaacaatcgacacaatcgcgcgtaacaagatcactttaaaaggcccattaactacaccagttggtgaaggtttcacttcaatcaacgtgactttacgtaaaaagtttggcctatatgctaatgttcgtcctgttaaatcatttgcaggtacacaagctcgttacgacgatatcgacatcatcactgttcgtgaaaacacacaaggtatgtactcaggtcttggccaagttgtatctgaagatggtaacgaagcagaagcaatgtcaaaaatcacccgtgaaggtgcagaaaaaatcgtaacttttgcatacgagctagcggtacgtgaaggccgtaaaaaagtaacggctgttcacaaagctaacatccttaaatcaacatctggtttattcttaaaagttgcacgtgaagtagctgagcgttacccgcaaatcgaatcaacagaaatgattgttgatgcaacatgtatgaaactagttatgactcctgatgagtttgatgtaatcgttactacaaacttattcggtgatatcttatctgacctatgtgctggtctagttggtggtcttggtatggctcctggcgcaaacattggtgaagatgcagctatcttcgaagctgtacacggtagcgcaccagacatcgcaggtaaaaaccttgcaaacccaacttcagtgatcttagcatcaatccaaatgctagagcacttaggtatggctgacactgcagagcgcatccgcagtgcagttgcagatgttatcaaaacaggtgaccgcacaacgcgtgaccttggcggcagccacggcactacagacttcactcaagctgtaattgagcgtctataagcgaataattgtttagggcttaagacaacctaacccttaaacactccctacccaaagccagtctaagactggcttttttataccctcaattaattggacatccacattaattagacatccataacacacataaaactagacacccaacttaatagttctcacttctcaaaattatgactaaacttacatagttcactcatggaggagaagaacatggcaacccctcgcagaaacttaattagcgtttcaaacacaccctattatcactgtatttcacgctgcgttcgtcgcgcttttttgtgtgggcatgatccactaacaggccgctcatatgaacataggcgggattgggttgaaaagaaactacttcaacttggtcggatattttgtattgatatttgcgcctacgcagtaatgagtaatcacacacatctggttctgcacattgatatagcaaaagcgaagcgtttaagtaataaagctattttgattaggtggcacaagttattcaacagtacattcctatgccaacgcttcttaaatggcgaattactaacacaagcagagctctcggcggttaatgacagagttaatttatatcgagaaaggctaagtagtattagttggtttatgcgtgttctaaatgagagcatcgcgcgaaaagcgaatcaagaagatgattgcaaagggcgcttttgggaaggtcgctttaaatcgcaagccttgcttgatgacgcagcacttgcagcttgccttgcttatgttgacttgaaccctgtgagagcaaaagcagctaatttaccagagcaatcagactacaccagtataaaatcacgtattgagtcagctcaaaaagcaaagcaaccgaaaacacttatgcgctttgcaggtaaactacgcaaacatatgcctaaaggactcccatttgaacttaaaacctatttacaacttattgattggactggccattctataagagaaggtaaacctggtgtaatccccctagatgcagcacctatattagaaagattaaatatctgctctgataattggcttacacttaccacttcctttacacgctcatttaaaaatactgcaggtaaagagcaagctatcacggcttatgcaaataacatgaaacgaaagcgaagaagctcaattactaacagcttagctttatttgcttaattataaattaaacctccagaatataattaatgagcacaacctcgttgcaaacctgaggtaagcactctttacaactaatgcttagcaaattgtccaagaataaaccaaatccatcatttttagtgttaatttgcattttagtgggcaaatattattcataccttaatatccacacgctcttttagttaaagaccatatagattgttaattacgattgaaaaataaaactgtgtgtcttgtttagttaagtcgcgtattggctgtaagtaaaagttaaagtgggtgtcttattaaaagagtttaaaaagtggattttactaggctaagttatgcgtatcagtgataagtacgcattatctatatgcaaagctcaacattcatcacacaatcaatttaatgcatagttacacctgcaaaaacataaaaccacactttaatttgcaataaaaacatacaaaaatgaaaatatagaaaaattaatgcaaaataacacttttgcggttgacatcagtttctaaaacacttaaaaatacatctaacattttttaaacaacagccttctagtcggctgtgatttttagaagaaattaataaacaatgaatattagccgtcaccttttagtcgtcaatgtactcgtactggtcttagtaacaagcccagcgggagtctattaaaaggtgaaagcacgctttttaaaaaacccccgccctatgcgggggtttttttatgcatttatgcttgcacacacagaggaatgaggatgagtacaacagaatacaatggatccgaactagttgttcgggcacttaaagaattgaatgtaaagtatatttttggttaccctggtggttctgtacttgatttatacgacgcattatttcagcaagaagatattgagcatattttagttcgacatgagcaagccgcaacacatatggccgatggctatgccagagcaacaggtgacgttggtgttgttcttgccacctcaggtccgggtgcaacaaactgtattacgggtattgcaaccgcttatatggattctattcctatggtggtgctttctgggcaagtgcctacaggtttaattggtgacgatgctttccaagaaacagatattgttggttgttctcgtccaatcgttaaacacagttacaactgtcgcagcgctaaagatatccctactattttagctaaagcattttacttagcgagcaccggacgcccaggcccagttgtggttgaattaccaaaggatatgttaaaccctgagcttaagtttccttttgagtttccaaaaacaactgaactacgtacttataatccaaataccaaaggtcattcaaaacaaattcgtaaagctgtcacagcaattttagaagcgaagaaattagtgatctattctggtggcggtattattttatcaaatacctctgagcaactaacgcacttggttgaatcattaaacgcaccaatcactaacaccttaatgggcctaggcggtatcagcggcactcaccctaactttattggcatgttaggaatgcatggtagccttgaggcaaataaagccatggcgaacgcggatgtgatcttagcgctaggtgcacgatttgatgatcgggttacgaataacgttaaaaaattctgcccaaatgcaaccatagtacatgttgatgtcgatccaacttcaatctctaaaacaattaaagcgcatatcccggttgttggctgcttaaagaccgtactcgaacaattacaagcggctattgataagagctcaatatcgatagaccgttctgcgcaagaagattggtggcgacaaatcatcagctggcgtgagcaaaaatgccttagctacagcacagatggcgataaaatcaaaccacaagcagttatcgaggcaatttacaaagcaaccaatggcgatgcttacatcagctctgacgtaggccagcatcaaatgtttgcagctcaatattatccatttaaacatcctcgccaatggattaattctggtggtttaggcaccatgggttttggtctaccagcggcaatgggcgttaagcttgcttttcctgacaaagagtcaatctgtgtaactggtgatggttcaatccaaatgaacattcaagagctatcaacatgcttacaatacaatttagcagtaaaggttgtgtcgttgaataaccgctcactgggcatggtacgtcaatggcaggatatgatgtattcaggacgtcactcatcttcttacatggaatcacttcctgatttcgtaaaattagtagaaagctatggccatgtaggtattcgcgttgatcatattgatgaactacagcctgctattgaaaaagccatgtcgataaacgacagactggtatttttagatatctgtgttgatgaaaaagaacatgtttacccaatgcaaattaagctaggggctgtagatgatatgtggttacgtaaaggagtaaaagcataatgcgccgtattttatcaatcttattagaaaacgaacctggttcactatcgcgcattgttggcttattttcacaacgcgcttataacatcgacagtttgactgttggtacaactgacgatcattcattatcacgaattaccattaccaccatgggtgatgatcgtattgttgagcaaatcaccaaacaagttaataagctagtcgatgtactaaaaattatcgatctaactgagatggcacatattgagcgtgaactgttattagttaaagtattcgcacaagatgagaatacacgtgctgctgttacacgagttgttgatgtattccaaggggctatcttagatatgggccgtcacagctatactctgcagcttgtagcgagcacagagaaggttgaatccttccttgatacattacgtcatgaaagtgatttgattgaagtagttcgctctggcgcggttggtattggtcgtggtgataaagcgttaaaggcataagcctttttcgccacttcgattcaaatataacaaatacaaaaaaagggctataagcccttttttcaatataaacctagttacccaattatggattaacttggtctttaagacctttacccgctttaaagcttgggatagttgctgctgcgatttgaatttctgcaccagtttgtgggttacggccagtacgcgctgcacgctcttttactgagaaagtaccgaaaccaactaatgctactgagttaccttctttaagagaattagtaactgcgccagtgaatgcatctagtgcacgcgttgctgccgcttttgagatttctgcatcagtagcaattttttcaactaattgagctttattcattgttagattcctattcgttattattttgccttcgcaaaacctatctttatgcatttttgagaagttagcaacagcaaattgctatttttacgtaatttgttcaaaaatgactactatttaactttcaaaaacgaggttagcgacgttaatattaataaagacttaatttaatcaacatcgcgaagttttctggtaattaaacgattactcgattttctcgataactaaggttacttccccgacctcgatgccaaacttatcaatagcagtgcggtttatcaagcgtgattgtgttaccaagtacatccaatcatcgaaatttaccactaaagtactatcatcatatggaagctcgacagaatatgtccaatggaacacactgccattactttcaccttttgcttcgccaataacatctgatgccgtacctgttatactgccatcatcattaatggtgatgtaccaaacacgtgtttgcgtttcaccgtcatcataaacaaattgctcgtcaatcacgcctttgttgccatcccagcttgcttgcatgtcgactaccagcttacgagttaattcgcctttatggtcctgtactaccccataggcttttagctcaccactaaaaaactgcttaaagttaaattcaggttctgtacctcgataataatcaacatcgggcgcagagcagctggtaattaacattaccatagctaaaataaggattgctttgagtttaatcatgtttccctccaataagctgtttgcgtagtgatggctcagaagtctctgcgcttagccagattgctaaaaagttatcggcaaacttgtcatcatttatctgtccaagtgccttgccattaaagtaaaaggtccctattgcctgctcatttgtttgaaacgttaatgaatcgtttttagaaatatcgggccataagtccaacagctgtttgtcgtaagcccctaccatttcatctaagcctaaatgctgccattgctcgttagtggctttaacaatgtctttggctttaaaatcacgcaaataggtaagtgttaatttactagggtgttgaccgaatgtgtaagtgccgttgggagtctcaagtttggcgttataaacatcccaaaataaatactccattttagcttggccaacggttttaaaaccatttgcagcaacatctgccataaacaatgagcacataaatgccgctatagtcatacactgtttcatcgtcttatcctaaaaaactagttatgcaatgttacgtaaaaccatcactaactgatcatttagcggctaaaaaacgcttattaaaggtaataatgcatacaaacatcgttgcccagcctaaaccgtaatacagccaaaaacttacaacagtcagatccgtgcttaatacaccaaatcgtatacctgcataatagctagccggagcaaaggctaaacaaaccaaccaagcgaaataccaaggaagcttttgcaaaaactgcatagacgtattaatggtaagtaatagtgcagcccaaagaaaagcgagccatagaggcaatggagatactttataattaattagctcaaaaccacttgcaagccattcatagcccagcgcaattggtagaccacatgctaaaagcagtatgtcttgcttgcgttgctctgataaaaaaagcattaaacaaataataaaagaggcagggattaccgcatcgcgctcaaggagtaaggcactaaaccatactccttgaaacaacacgaaattaataatcgagcgcaatgccatcgtcagagtgtccaaatcgcggtttacgggctacgaggtgcacagtgcttattgcacgagttctaaatgcaccttcacaataggctaggtaaaacaaccataaacgataaaagcgctgatcaaacttaactttatcaatttcaggccagctggcaacaaagcgctctcgccaatcagccaatgttcttgcatagtgaacaccaatatcttttacactatgtaccaccatgtcagtttgctgtttaatttgcttattcatttcgtctaagcaagggagacaaccacccgggaagatatactgctgaatgaagtcagagtttttcaggtaatgactataacgttgatcagcaatggtaatggcttggatcagcattgcgccgctgtctttcaacaaagagtgacatttggcaaaaaagcctggtaaatattcatgcccaacagcttcaatcatttcaatagacacgagcttgtcgtatttgccctctaagagacgataatcctgctttaataaggtgattttatgctcaagatttagctctttaactttttcttcaacataggcatattgctcatctgaaatagttgtagtcgttacatggcagtcaaaatgcgttgccgcgtaaatcgcaaaggcgccccaccctgtgccaatctcaattactgagtcacctggctgtagatcaacttgctcacaaattaatgccagtttgtgatcttgggcttgttcaagagtggcttgttttgaagggtacacggcacatgaatacaacatttcatcacttaaaaatgcactataaaggtcgttacctaagtcataatgcgctgcgatatttttcttagaaccttgagctgaatttcgatttctaaaatggtttaagcgatgagctataccactaaaaaaagcgaattttttctcaaaagcatcaagctcgtcttggtttaaggcaaatatttcaattaatttagtaaggttatcacaatcccagaaacctagaatgtaggcttcaccagcgcccacgcttcctgacaatgcaaacaatttatacatagctgcatcgttaactgtaacagtggcgtgtatatcactggttgtatcaccaaattgtgtacggtcatttccttcaattaaagtaatgcgaccaattttgatgctattaaatgcacctattactaattttttgtatagttttgccacccaacctgttgcttgagtctcagtcaaatttgatactttttccatcacatcacctagtttaattctcttgtttgcccgaatgaccaataaatggcacacgtttacaaaatagtttcagcgcgtgaatataaatacctttgaatatactcaacgtcattgctggaaactgcttgagcaccgcactcatcctctctttattgagtggatgcttttgtaaacgtagcgttgcgtcaaacaagagtgtgtcgtcttttttattttcaatatgaatcatggtgttatcaggattcattctgatatgccaataatagttcatatctaagttcatgaaaggtgatacggaaaaaacctttttaaagttcacttttttttcgagcggcacgacataataatgacgttcattccacggagtattacttacttcagcaagcatatgcgtgaaattaccatcattactttggtagaaaaaaaagttaacaggactgaaatatattcccatacaacgaagttgcccaagcatatacactttagtaaaggtttgctttacacctaattcagctatcttggcgagcgcacgttgctgtactgatagctgcatgtttgtctgaaaattaaaataatcgctttgtttaaactttagaggtttaaagcctgaacagcccagccatgggtgaatgttattaagttcttcaggctgagctaaatcgacccacatcatgtaaagtgggtatttgaaatgatgttttttaactgcaaaacgtcggtgtcttacgtcaccgacataaatggcgctattcaaattcaaccccaagctgctttgccacgttgaccgcacttcttacaccatcttcatgaaagccgttataccaataagcgccacagaaatagctattatttttgccgtcgattaatgacttttgctgctgtgcggcaatcgattctttattaaataccggatggtggtaggtaaactcgcgtaaaattttatctttattgataccgtcaaggtggttaagggttacacaaaattgcgtgtcgctttgaataccttgcagaatattcatttgataagtcacaacagccgctttgtctgtgttgttattcaacaaatagttccagctagcccaagctgccttgcgttttggcaacaacgctgtatcagtatgtaaaaccactgaattagcagtataaggaatggctgaaagtacattcttttcgtcttcacttgggtcaagtaataactttaaagcctgatcagaatggcaagcaaacaccactttgtcgaatatttcactatgaccatcatcaaaatgaacgtgaacactgtcatcttttcgagataccgagctgatattgctatttaaacgaattttatcagcgaagccttggatcatgggtttaatgtattcgcgagagccacccggaataacataccactgcggacgattagtgatatccagcaaaccgtggttataaaaaaacttaacaaaaaactctacgccaacttgtgccatttctttaatactggttgaccaaatagcagcgcccatcggcaaaatataatggaagcgaaagaactcgttaaagtcatgctcatccaaaaactcgcctaatgtttgattggccttgtagttttgttgtgcatgcaatgatttacacacttcattgaagcgcactatgtcttttaagagtttccaaaacttaggacgaaagatattacgcttttgagcgaacaagctccaaaaagtatgaccgttatattcaaagcccgtttgctcgttatgcacactaaagctcatttgagttttctgacgctcgacacccaaacgcttaagtaatttttcaaaatatgggtaagtgcggtcgttaaatacaataaaacctgtgtctacagcgtattcaacgccatcaacctttacgtcaatggttgcagtatggccacctatgtagtcgtttttctcaaatacggttacatcgtagtgcttatgcaataggtgcgcacagcttaaacccgctatgccagatccaataacagccacttttttcaacgtgataatccttttgctagcttcagccaaagtggcgtaggaagcattcttaaaaatttcaaaatgaaggtaaaacggtgcggaaagtgcacttctttgcgccttttcgcgacccctttataaatataatttgccgctttttcagcactcaccgccattggcattggaaagtcgtttttatcagtcagcggcgttttaacaaaaccagggtgaactaaagtcacatcaacatcttttaaatcaaccgctaagctattagctaaataacttacaccggctttagacgcgccataagcctggctgcgcggtagcggtaagtaagtcacactagagcttacaatcaccagctgaccaccggattttatctttggcagtaatgcctcaaggcaatagcccatactgagtagattagtggtgatcacacgttcgaataaactgctatcaaaattacgagcatcatcaatatattcacaattgcctgcatttaaaatgacacgatcgaattgtgtataggcgactgtgctcgaacgtatatcctgaaggtctgttgcatcaaattggcaagactcaatgttttgatgttggctcaatttagcaagcttttctgtgttcctgccgcatgcaatcacatgctcattattgtctgcgtatagctttgctaatgactcgccaatacctgaagttgcgcctgtaattaatgttgtcattatgcactcgcccttttatcaataaatttaacagccgagccaagtacagggatatgcctgtaaagcatagcgcctacgtcaaaataatcgcgatgattaattattttatcaccagcaaactttaaacggctatgacctgcaaccgagattgcttgccctttattgagcttgggatgacggtattgcatggtccagtagataaaggcggtatcatcgttgctctgagtattttcagtaacatagctgtcttcaataacaaattcgcaagatataacgttagcatagaggtttttgaaatactcacgtagctcgccaagaccatttaccgcatgcaagggatctgcaaagtgaatatctggatgatagatttcatccagtagctgtaaattgtctttattgagtgtttgataaacatcaataaatctatcaaggatcgccttgtccatgtcacaccttaaatgcgtttagcgctcgctctcgcgcggctttatgatcaacaattgctggccaataactgctcgacttaccctgtttcgctaaataatcatgcggaaaatggatttgctttgcaggtactttttccaactctggtagatatttacggataaattcaccatctggatcaaatcgctcactttgggtgattggattgaaaattcgaaaatacggctgagcatcacatcccgtacttgcagcccattgccagccaccgttgttagaggcaaggtcgccgtctataaggtgctgcataaaaaagcgctcgcctttacgccaatctattaataagtgcttagttaaaaagcttgcgaccaccatgcgcaaacgattatgcatccaaccagtttgcagtaactgcctcattgcagcatcaactagtgggtagcctgttttaccttcgcaccacgctttaaagtcgctctcatcatcacgccatttcacagcgttgtatttatcattgaagttgtcgtatttacttaggcttggataaatagcaataaggtgacgataaaactcacgccaaatcaattcgttaacccaacaaaacaagttacttttgctgctacgtagtacatcaggatggcgctgctgaataagtgccaataattgctgaacgctaacaatacccaaggctaaatatgggcttaatcccgaagtgcctttaatgcttgggatatcacgctggtcttgataagttgctagcttttcttcaataaagcgtgcgcaaacgtggctgagggtatcatcatcaacaggccatttttctgagctgccgtcagagtctaataactcatttggctgccattcaatggcctcgaacatcttaggcggctcagcaaaataaaagtgggtgtcttgataaacttttagccatgcatttttaaatggcgtgaatactttgaacatttcgccgctttgatttttgatgcttccaggtggcgcaattacatcgccgtcgtatgcataaaaagcaatatttttactgtcagcatgctgtaaaaacgctttatcacggtttacttcgttaagctcatattcgttgttagcgtatacattttttacctgatgttgctcacaaaatgacgctaatttttcaacgcacccatcgtaatcaaccgcatcaatgacatataatttaatacctttactggctaaaagctcacctaaaaagccaagcctacgctttagtaaatcaagctgtatagttgccacatcatgtttttgccattgcttttcagtaataaaaaaaactgcattctcgcaaccattttcgattgcctgatatagtgcatcgttattaaaaaggcgcaaatcgcgcctaaaccaaaataaagtgttcattaaattccgtagcgtagttttaattcgttcggataggggtctagataaacttgtttcgccaagtattcatttgggtgaacttttaaatgatgcttaattaatgtcagtggaacataaagtggtacgagacctttacggtattcgtcaattgcatctcttagttcttgcttttctattttagaaagtgactttttgaaataaccctgtaaatgcatcaaggtatttgcattgtttttgcgagaagctggttttttgagggctgtcattaaccctagaatatattcatctgccaaggcttggatatcttcaccatcaaaggtgcccagtaaattccctaaactacggtaagcttcgtaattatgtgccatcaataaatacttatattgagcatggaactgggtcagtctatgaactgtgagtggctgctcacatagtgtttgccaatgcttgtaggtgtaaacgcgcataacaaagttttcgcgaagatgcatatcgtttaaacgaccgttttcttcacaaggcaacaatggattgtgcgccattatttgctctgcaaaaaagccgacaccttctgaggtgttacctgtacccgcttcgttgtagattttaatacgttccataccgcaactagggcttttggcacaaaacacaaagccgcttaactcagcggtttgctctgttgccactcgtttaccatattctgttagtttagggccaacatcgccagtaccatcaggacggcacactttaatggtgtcgccaactcgcacttggcgaatcgttggtctagggattggcaaccctaccgctacttcagggcaaaactttttatactcaacatggttagccaactcatccatgcaaaaattagattttttgtgtccactgtcaaagcgaactttgtcgcctgctaaacaggcgcttaaaccaattttaattgtcgattgctgcatataaactctactaatagattagattaccaattggatttagtaatttactaatacctttattgaagtgtagggcactactaacaactgtaaagcacaagcacccttcaattgtttttggcgtgtgattgtggcgaccatctaacatcataaagtcacctggaacatagtgtccgtcttcatcactaaactcaccatctaataataaagttagctcaaaccccgtatgcgtgtgctcaggtatttcaccacccgcatcaatgtgcaatagacttgctcgtaatgggccgtcgtctaaatcaatgcgagagcgggcaagtttacctatttgcataaagttactgtgaccaatacgcgtaagtgctctaggtaatgtgtaggttttatctttaacatcaaccgatacctgtgcttgctcgtatacctcatcgattgactcgtcagctatgatggcatcaaaaagagttttatcgaacatatcatccatatcattagcagattcgataaatatgtcgtcagcattttttgcctcaagcgcggctaactctttttggcacacaggacacatttcaacatgaatagcgactgcaacactcaaagtggcaggtaaattaccttcactgaacttggcaagtaattcgttgctaggatggtgcttaatcatggtggtctcccatttcattgcgtaacttctgcaaggctaagcgaagacgggacttcactgtgcctacgggaatatttaaatgctcagcaagttgctcttgcgacatatcttgaaagtaaacgccacgcacgacttcacgttgtgcaagtggtaatttatcaaggtattgtttaatttgtttatcttctaagtggtcactaaattcgtgttgacccggctgggcttcatcaattagaggccaaatatcttcactaatacactcttctttactgctcttcatttttctgagcatgtcgaaagatgcgttacgcatcacggtataaacccatgtcgtcgccgcccctttctctttatggtaaagatgtgctttacgccaaactgaggttaacgtttcttgaactaattccattgcttgtgcttcagagccgaattgctttatcccaaaacgtttaatttttggtgagaaatattggaaaagtattgcaaacgcacgtttatcacggtgcgtagcaacagcaaataatgcatcagcaagctctttgcttggtgtatctggcatggcagagtattgacctgtgttaggtttacaacctgtttgaagttgttgacttaccatctttatgtcatccaattattgtcgtttgtagtaatacgccaaaaagttgatgttagatcacattaatcagtaaattcgttgttaattagagtatggaggaaacttagcaagttttcaaagctagatttataagcaagttgttgttttttaactaacgatataggcaggatctctagccaacgagcagcgacccaagcaaggttatcaaattgtggagttttatatagacccgctaagtcaggctgatttgcaaacacagcacgaagtgtgtcacttagtaaggtgttttcgtcattaattggcgtgcttacataccacgaaggtgacgtagttatttcgatgtcagcatggcgtagctgctgcttgtcctgactagcgttgtgaatagaaaccgcatgttcagcataaacatcaattaatagttggccattatcatcttgattgaaatcggttatttgcattaaacaacctatctcgggcaagttaaggtctgtgtcgtgttggtaagtgcaaagcacaaaacctgtattatcttgcacagcttctttgaccattgttaaataacgttgctcaaagattcttagcttggtgaacccttcaggtaaaataaaaaccggtaaaggaaaaatcgcacgcttcataaagtctactattctaaaaccacatgcctttaattacgtgcgctttctatccgccgatcaatatttcatgaaatcttaatatctacttgtactttagaagttgaaccattgcgcaacgttacgaaataattcgattgatgcatatgcactgagtaaactcaaaaccggtgcaaccataagtaaaaataagctgatttcactactcattgtcttgtttccttactgcttgtttgttgctttaggagcttgagcaacttttaactcttcttctttcgaagcaattgcatcttcactcatgtaagtatctagtaacttttgagcatcaaactcaatgctgttcattacgctttgtttcaattcgttacttgcttgttgaacatagcttttaacagattgtgtaattgtgttgctgatatctaattcaaagtcagtagcacttgcttgagttgacgcaaatacaagtaacgcagcagtagttaatttaagtgagttattcatagtggtattccttgtctctttaagtaattagtcgtaattacttaatcaaaggttgtgccaccctgaaaataaattttaaattattgattttaaagaatttaaaaatatatttattttttaacctcattcagggttagttaataataccaaccaatttagatattttgactaatatttagtgaaaaaataagcattgccaacttcagcgtacacttgtacactgaaactgttttaatcactcatttttagtagatagatatgacagaacaactcccctactcacgccaagaagaacaacttaacgtgctcactcacagcatgggagtcctgtttgcggtatatgtgctgtgggatttaatatcacaatctaacgttatatcagctacggtaagtgccatcgtctatggagcaagcctactggtattatttttagcttctactttgtatcacgcaagcaccaaggagcgtatacgggccatttataaaaaatgtgaccactgtgctatttacttgcttattgcgggtacttacacgccttatttggttatttcgttatcaggggcatggtcaattgcagctttagtgtttatttggtctttagcacttggcggcgttgcgtataagttactagtcaaaaacaccaataaaaaggtctcactcgctacctatttattaatgggttggtttgcattagcgcttgtttacccactttatttaaaccttgatttaagcgctttatggtggctgctagcaggtgggattgcttacagtttaggcactgtgttttacagtgctaaaactcgccattacagccatgcaatttggcatgtatttgtgctggttggctgtgtttgccactacttatcaattagtttgtatgtttattagtgccactgatgcaagcgcatattaattttggccttgttaaaggtaacgccttcactgagtagtttttgtcgttgctcaagatgtttattgctaccctctggaaacgatattttgccctggctatttactactcgatgccacggaatacgtgaaccttcaggcatcactttcaataaccgccctactaaccttgcgttattaggataacctgcaagctttgcaacttgcccataactggctacttttcccgctggaatggcgcaaataatggtataaattaaatcttctttagttgcctgctgcacgactagactccaaatactgtttgctgacttcgctaaaatcttgccaaatagctctcgcaacagggccatgatggacagagtgctgcctaaaaacacgtatttcagcgccaaactggtgttcacggtcagtaatttttatttgctgcaacaaaccggcttcaatctcagcttggcaatgttgcaaactaatcatcgcccaacccgcaccagacagtaaaaacgactttacactggttatatcgtcaattttcattaatgcagagcccaatgtataagacaacctatcactatcgaaactcaagtcactctcaaacatagccaagcatgggtaattttgaatatcagcaaagctaattttactaggtaccacattaggtgcgctgactataccgatatcaaatttacctataggcaaactttcaagatcccctgttgcatggaacaggtcaaaccaaggcccaatccctaagtccgcttgatgactgtttacttgttcaagggatacaaagcgtttacctgaagaaatactaaactcagtactagcaaaacgttggaaggtttcacttatgacttgattgtaactaggttggtggcaaagttgctcgtagcaaattttataattagcttcatttcctagcgccaactctttagcaagcgagctcagttcactgtttgcgttaagtaactgacgtgcctcacgataaaaaatacggcctttttcagtaagatgtaagcgatactggctacggtctaaaagctcaaaccccagctcagattcgagtttttttatcgccagtgttagtgcaggttgggttttatgaagttttatagcggcttggctcaaactagcactctgtacaattgcatctaaaataacgagttgatttaggttcatgatataaaaaccactatataaataaaattaatgatgtttctaaaatttaataatttttattttatatgtttgcagcgtatcctgcagctaatttatgcatcatatctatggagaagacaatgaaattggcattcgttgcgataactacgagcctaattttgatgcttgcggcatgttctgagcaggcatctaatactgaggttgagccagttgtgcgcccggtaaaattattcactataagtaatctttcagatgaaactatacgtagttttccagctgaagttgttgctaaccaaggttcatatctcgcctttagagtgaatggtgagttacttgagttcccagcgcttgccggtcagcatgttgaaaaaggacagctgcttgccaaactcgaccctgaagactttcaactacaatatgatgagcgcaaagcgcgttttgaactcgcagagtctcaacttgaacgtgtacaaaagctttttgaccgttcaatcgccagtcaatctgagttagaccaagcccttgctaacaagcaagtagcagaatcagcattaaagatagccaaaacgaatttagataacagtgaattacgtgcgccgtttgcaggcactgtagcaaaggtgtttgttaaaaactttgagaacattcaagccaagcagaatattttacgacttgaaacccgtgatttaatggatgttgttattcaagtcccagaaaaactcattgcacgcatcgataaagatgttgaatatcaacctgatgttgtctttgatggctatcctaacaaatcttataaactgtctgtgaaagaatttgatactcaagcagatccaatcaccctaacctataaagtggtattttctttaccggttcctaaagattttaatctacttgaaggtatgactggccgcgttgatattgatttaagcaagatcaccaactcacaatcaccctatacattattacctgtagaagctgttttctctgagccaaccgagcctgaaagtaacaatagttatgtatggatttatgacgaagaaagtggccttgtccataagcaagctgtagaagtaggacagctacatcgtgatagcattgaagtattatcgggtatcaaagcaggacaaaaaatagtcgctgcaggggttaactttttagaagaaggcatgaaagttcgtccttggcaaaaagagcgaggcttataatgagctttgctgcacttgctatcgaaaggaaagtggtaagttggatgtttgcgctgtttttgcttattggcggaacagtggcttactttggcttaggacaacttgaagaccctgaattcacattaaaaaaagccatggtgatcaccctgtatccaggtgcgtcgccacaacaggttgaagaagaagttacatttcccatagagaatgcgattcaacaactgccgtatgttgattacgtgaccagtatttcatcaccgggtaaatcgcaaattaccgtcgagatgaaaagcaattatcgtaaacaagacttacgccaaatatgggacgaactgcgtcgtaaaatcaacgaccaagcagcctcaatgccatctggggtttatccgagtaaaattatggatgactttggtgatgtatacggtgtgatgtacgcggtaactggcgatggttactcttacgatgaactgaaagattacgttgattatttaaaacgtgagcttgtgttggttgatggcgttagtaaagtaactgttggtggcgagcaacaagcacaggttatggttgaaatttcaacccgtaaacttgcccagctaggtatttcacccaaccgcatttatcaacttttacaaactcaaaatagtgtgtcgaacgcaggtaaggtgcgcgtcggcgatgagtcaattcgcttacacccaaccggtgaattcaaagacgttaaagagcttgaaaatcttcttatttcaaagccaggtgaaaatgaacttatttatttaggtgatgttgctaaggtatttcgtgaatacgctgaagtaccaaacaatattattcgctataaccaacagcaagcattactggtaggtgtgtcgtttagcacaggcgtaaacgtcgttgatgtaggggcaaatattgatgctcatttagcgtcactcgaataccagcgaccgcatggtatggaaatcaacagcgtttataaccagccagccgaagttgagaagtcagtaagtggctttattatcagcctgcttgaagcggttgccattgtcattattgtacttttagtctttatgggctttaaaagtggcgtattgattggtgtaatacttctgcttaccgtattaggcacctttattttcatgaagttgtttgccatagatttacaacgtatctcattaggcgccctgattattgccttaggtatgctggttgataatgccattgttgtaaccgaaggtatattgataaacctcaagcgcggacaaacaaaactgcaagcagcaactaacatagttgatcaaaccaagtggccgttactcggtgcgacggttatcgctattacggcatttgcgccaattggtttgagttcagatgccagtggtgaatttgctggcagcttgttctgggtgttgtttatttcattattattaagctggatcacagctatcaccctgacgccattttttgctgatttaatgtttaaacaagcaactgcaaaacagccacatcatgatgaagacccttatcaaggtgttatttttaatgtctataaaggcgtgttacatgcggcaatgcgttatcgtaaaaccacattgttaataatggttatcatgctagtgagtgctgtgtttggttttaaatttatcaagcagtcgtttttccctgcatcaaatacacctatgttttatgttgattattggcatacacaaggtgctgatattcataccacaatggatggcgtcgcaaaacttgaaaaattcttacaagcagaccctcttgtagaagaagtaacaacgacagtcggtcaaggtgcccctcgctttatgctgacttacgcacctgaaaaatcatacccagcttatgggcaattgattattcgtgtaaaagaccgtgaagccgtcaccactatgatcaaaaaagtacgtgattaccaacacgagcacgtacttgatgctcagcttaaagttaaacgtatggaaattggcccatcaactgatgcaaaaatcgaagcgcgtttttctggtgctgatcctgtggtacttcgccagttagcaaaagaggcaaaagacattctgcatcaagatgcaggagcatttaacattcgtgacgattggcgagcacgttctaagttaattcgccctcagtttaacgagcaaaaagcccgtcgtttagggattgccaaatctgacctcgatcagctgctgttaaccagcttatcaggtaagcaagtgggtgtttataaagatggcacgcaaatgctgcccattattgcccgctcgcctgcagaagagcgcttaaacgttgaaagcctgcgtgacttacaaatatacagccctgtgttaggtgtgtttgtacccgttacacaagtggttgatgactttgtggttgagtgggaagacagcttgatcatgcgacgtgatcgtaagcgtactatcacagtgatggccgaccacgatgttattggtgatgaaacaccagcaaagctctttgcacgtgttcgcaaagatatagaagccattaaacttcctaatggctatgaactgcaatggggcggcgagtttgagtcgtcaagcaaagcacaaaaagccattttcggttcattgccacttggttatttagccatgttcgcaatcacagtactgctgtttaactctgttaagcaaccattagtaatatgggcgacggtgccgttagcaatcattggtgtatcggcaggtttattactaatgaatgcagcatttagctttatggcactgcttggcttacttagtttaagcggcatgctcatcaaaaacggcattgtattagttgatcaaattaaccttgaactcgatagcgggaaagacccttataaagcagtgtttgactctggtgtaagccgtgttcgccctgtagcgatggctgcgattaccaccattttaggcatgatcccactgctatttgacgtgttcttccagtcaatggcggtaaccattatgtttggccttggttttgccacagtgctgaccctgattgttgtgcctgtgctttataccatgctgtttaagatcaaagtacctaaacagcgtcacgctaattaatacagattgactctcaaccaaaagccctaacagcaaactgttagggctttttctttattagaatgactggtaactaaaaccgccacagcataaaaagctattcaaacactacattttaaaagctcaagcttactttttcaggcttaatgtacctgtgcgtttggtgctgctacgtttcgtttgatttggttttgctgagtgcgaattgccagcctttgctcttgattgaccttgtttggcatcgttgcgtgcttttttcacgtattttgaaaagtcgcgctttttttcttcttcattgcgtggtttttgcttgccgcgggcttgggttggctgtttattttcatcaattgagcgctcttctgttttacctgagtcggcaattgagttattgatctctgccatttcttgctcggttaaatgacgccactgccctacttttaaaccttttagggtaacgttcataatacgtgtgcgtttaagagtcaccacttcataacctaaatattcacacatgcggcgaatttggcggtttaagccttgtgttagcacaatggtaaattgctgtgggccagtttgttttaccttacactttttagtaacagtatcaagaataggaataccatttgccatcttgttaacaaactggcggtttagcggtttatcaactgtcactacgtattctttttcatgattattaccagcacgcaggattttattaacgatgtcgccttcgttggttaaaaaaatcaagccttctgaaggcctatctaagcgtccgattgggaaaatacgctctgggtagttaaccgctttaacaatgttactttgaatttttcgctcagttgtacaagtaataccaacaggtttgttataggcgatataaactcgtttaggttttgcttttaatggctgaccatcaatcagaacgtcatcatcattgctgacttttacgcccatttcaggcaagttgccgttaacagttacacgaccttcttcaatatatttatctgcctcacggcgtgaacaaaaacctgtttcactgataaatttatttaatcgctttaactctgtcatggcatacttctgtctggattttaaagccgctagtttataccagaagcctttgccaagctaggtagaatctaggctctttcgcagcacttttagtgcagcgctgcatttttaggcttttcactcaataaattatgcagggtatcaaaatcgaacgcgtactcgctacttttagtgttttgcagtaaaaaggtttcaaaggggataaccgaccagtctttaatatttctaagccagccataactttttatgttgtgctgtgtaatgaccccaagttgaaacttaatcgcattatggttttgccaataaggattaccatttttatgatcgactaagcttattaatgcccacgcacccatcataaaatgcccgccaacactggccgtgagtttttgctgttcaatcaagtctaaattttcatcaagccaatctataccaccaataaaataggctttctctgctttttcttttactgcttcaagtgcaccttgtgccattaaatcagaagcgcaccaaattacattagtatctggatatcgttgtaataaacgacttactttatgcactgcctcttgcttgttccagttggcataaacaacttgctcaagctcgacatcttgtttacgtaagtaatgaacaaggccatcactgcgggtatctgattcggagccataatgaccattaatcgcaacaaaatgcggcgtttgctttgcagctattgcctcattaagtaaagctttgccaagttgctctcccgctttaaagttatcgtgaaaaacctctcctaaccagtatttaaagcgctggcgaggcttaccaacttcatctcgctcaacgccgacaatggtttcttccagtgttataaagttaactttgtgctgctcaagtagagtcattgactgctcagcaccaccagggtaattgatcaagatagcgtaatctggcttggggttatattgtaggtactgttttaattcagctaattgaatatgacgattaccgccgccgtaaatggtcgtgagattgacattattttgctcggcagccacgtgcatgatatcactcactttttgccaaaatatgtcggttttaactgatggattaacgagcaacacagaaaactgatcgcctgcataaagtggtgaacagcaaagcaatgttaaaactaaccagcaagtgcgcataaccactccgttttgttttcttttattgtagtatacgagacattatctcgacaattttcgccaaattaattcacacggaccatgtttaaagtactggctatagactttacaaaataccaattgaaaaacaagcacacccgcaataaccaaccaataatctattcgatcgaaattaagtgcagcgcttgagaatgcaactttaaaaaacagtataaatattactgtttgcatcagatataaagtcaatgacatgcgtccagcctgctgtaacagcaaccatttactggatttatttttaactatttttacaatgatatggcaatagcaaatggccatagctaaagctgctagccaatttataggctcgacaatcgcgtacataaatacactactgttagggtctatcatcaaccttacgagtgttaaaccaatagccgctggaacaatcatgttaagctgagctttcgttaagccgtcaacaaaaaccccttgtttatatagataaacgcccactagcattagccctgcggccatccacatagtgatcagcggcactgcaataagcatcacagtaaacattaatatgttactgacaaatccagcaaagtaggaagaataagccgcatcataagccatcaaaaacgcgtctgaacttcgcgttaaaggcgttaattcaggttcgacaaaggcaagtaaaaatgaaataaaggcaccgagaagtaaaaacaacatgcccatacgcagtattttttcgttatcttgctggctaaatttaagggttaaccaaccagcacaggcataaataaacaaaatatcgccggcccaaagcaaaaagccgtgagcaaggccaatataagcaagcacttttaagcgattgtgttgtttatctatactttgccaaagctgccattgaataaccaatgaggcaccaaataataggcaaaaaaggcttctaaaacgtccatcaataaatagcacattaatgatgtttatgacagtatcagaaagtggtggcgatgagcttggggtataatcatactcaaacatagcaaaggtatagatgttcataaacatcaaacctagcaccgcaataccccgtaaaacatccatatttatattgcgcatagttcccttataagttttgtctacagctatcgctccaatttaccgcattttcgtatattttgggaagttccccactctcaatatttaaataggcaactgcttgctccagtgcccaccagcttcctgtttcgtatgctttaacagtttcgagaatgtaatagagaatattcttttcttgcattaatgctgcatgtatttcgtcaggaaacggcaatctatccaacagcttttccatcggctgatctaatattgcatcgagtaatgaaaacagccccgttaaaaatgcctctccggtttgttgttttgcgacacgctgcgctattaattcacaaaaacgcgctctgacaacacaaagccgagtaagctcggctggttttgattgggcgctatgggcggtgatgatcaaactaacaaactttttcagtcgttcatgacctaggtacacaagcgcttgctttaatgaacctattttactttttattggaaatacaccactgtttattaagcgtaatagcttgtaggcaagtgcagtatctaaagaaaacagtcccgcgatttcgctaatattaggatcagggcgcattacttcagcataaatcgacaaaactaatgcatagttgtaatcgatatcgcgatgttggatcatttttggttttgcaaaaaagtaaccttggaaaaaatcgaaacccattttgtaggctttctcataatcatcggcagtttcaagcttttctgctaatagttttatttttttatgctttttcagcttctgtaaaacaggcgcaatgtcctcaaagggggtttgcttcacatcgaacttaatcaagcgaattaactttaaaaagcggtcccattcaggttggtatacgaaatcatcaagagcaagtttgtagttattatggaaaagctcccgacaaaattcatagttttcgtctgttggctccatcgtttcgagaagctcaataaccacgtcttgagttggcaaaaacgcgcataggtccagtttcaacgattctggacctatattaattaacgcctttttgcccgacgtaatatggcgagtgcctagattgagctggttttccataatcagacgcgcagtagctgtgctctctgaaacatccgggaaactgttttttaaactatctctaaatagtagctcataggcgacaacttgttgacgacgattaaagaccgcttgcctagcaacaaatacagccactttacctacttttgaatttttatatcacactaagtaattaatagctgaaatagacaaaaaagtcacttaattaccatgaatcacgcaatatttattgatataagcctgataaatagccatctgcaacagatccccatgtaaaacgagcatttttagcttgttcacatatcgagcgccattgctcaggttgcgactttttaaggtctagcgcatcactaaaaccagtaataagttcgtagctttgagaggctaaactctcacctctaaaactaaaaccactgacattatgctcgaccgtatcctgtaaaccgccaacaccatgaactaagcatggctgtccagcgcgcattgctaacatttgacttattccacatggctcaaatgagcttggcattaagaataaatcacccaagtgatacatatattcaccaaccaagtgtgcatagccttttaaaaatagcagattctcttggcgtgccatgacagttgtcatgatttgctcaagttcagcatcaccagagccaagaattatcatgtagccatcatgttgctttaagcgttgacataactcatctaaaaccaatgctttttcataaggttgacgcagtaaaagtgccttttgatctgttaatcgaccaacactcgtaacaagcggacccgcaaaaggttttgttttgaactgtaataaacgttggtgagcaagataataacttgaatctaagatggggctcttcgccatccattgaaatagtgccgactctgcatgatggtaaagtgttgcaaggctgatatctttgagttccattcctggatattcacaaccatttaggatccctaccacacgaccttcacgataggctgcctgcaaatcagcttctagtccttctccaccaaaaaaaccatttgcagcatcactcggacgcaatacttcttgacagtaggtcggtgaaacaaggtgcactttatcaactaaattaatcgctgctcgcatcggattaaaacaatcgtgataacgcggatcgcacaatttctcgccgttataatttaagcccggaaaccatgcttctaaacttgagctatcgcctttaaatgggcgaataccctgcaatgccaaattatgaacggtataagctaaaaataacttagataatgtacggtaacgaccgtcattttttagtaataatgccacacaggcgctatgccagtcatgtaaatgcattacatcagggattcggataattccttgtagtaaggcttcacacaccgccgcattaaacaatgcaaacttactcgcatcggttgcaaagggcctgccaggttcatcattacaatacacggcaccattatggcgactgaattcccaatgagaaataatcagttgcgtaacaccgtgttcactattggcaagtttccacacgtctagttgctgcatatgccctgcaaatggaacatgtacaacaccgatatgatgacgttcaagataatgaaatccgtaatcagggatcacaacatcaacagtaaggcctttatcaactaacgctttaggacagtccctaacaacatccgctacaccaccgactttagcattcggtaatgcgtcattctctgcagccaccatcaacacatgcatgattagcagtactccataacattaattcttactatgaaacaaggagtagcaattgctactccttactacactatgactttaccattaaacaaagtatttattactttgctttgttgcctttgctttttctcaagctcattcaacatgtctcgggtaacaagtacgatcccctttttcgacactctaaagccattttctttatcagcttcattatcaaaaccaatttccaaggccagcagggatctcacagttacggtctataatagcacgcctaatgcggcaattacggttaatttaaccccaggtaagatcactgactcttcgatttcacagtatgaatgaacatatacattcgaaaacagcagtgatttctaaccattgaaccagagataatacagccacccgataccgttgaatccacagccataccacgtctatcatcatcattaaaaatgatttagcaggtggtaattgctcttgatatgtccaaatcggccatttaggatcgtataagtcaagctgaggctctggcataacaagctccatattggcttcccaaaacgaatccagggtacctacatcacgccagtatggctgccttcatttcatctctaaatgggtatgcaaatacattgtgctcttcaatgatgccggataatatcgtgaccaaagtcacgaccagaaccctctgttctgcatcttttttaactgttcaaataagaactctgtgtaaaaatgtagttacccattgacgctaaacaatacctggttacccggcactgaagttggctcagatggtttctcatcaaaacggcgaactctgttattctcatcaacagtcattacaccaaagtacctgcggcttcttcacacggtacttcgatacagcacactgtcatatctgcaccagtttcaacatgcttagcaagtaaaccgccgtaatccatgcagtaaacgtggtcacctgaaagaatcatcacgtatttaggcagctcatgacgaatgatatccatatttggaaaacggcgtctgccgtaccacaataccaatcatcacctttacgttgtgatgccgcagtatttctaccgactcaccgagttcttcttaaagtgtccccacgcacggtttacatggcggattaatgagtgtgacttgtattgattgcctaaccaacacgacgaatgctgagttaatacagtttatagaggaaaaatcgattattcgatgtttcccgccaaaatacactgctggctagcacgccagtctgttaattcatgtaaacgaaaccacgcccacctgctaaaatgagtgcatacgtttctcttgttaaactacttatgtatcgatttgcataactagcataactctctccgtcttaagttagctgcttttcttctgtgtgtttgctttgcctaatgtctaacagtggttccaagtgccagattcatcactgtattgactaattgttctatcgctcgaaaacatgccactaccgccgtatttaaaatactcatttgcgtccagtgagcagtgtctaggtaagctttttcaacttgctcttgtgcctcaacgaagctggcaaaatccatgggcaactaaccacggatcgtgcggctcttaatcgcagcaataatgtcgtcgaatagatttggttcaaacaagtttaaatgaccgctttcaagtaactgcattaccttgtataggctgtcggtttgatgaataatttgctcaggattatagtgcgcttgatatcatcaattgttctgctcgagcaccaaacaagaagaaattatcagcacctactgcgtcacggatctcgatattgcaccatctaacgtaccaatgtcaaagcaccattcatcatgaacttcatgttaccggtacccgatgcttctttacctgctgttgaaatttgctcagacaaatccgttgctgggcaaatagtttccatgctgtcacgtataattcggtaaaaaagccactctcaagtacggttttgccaatgatctttattgatcattcagcaacattattaattaacttaattatcttcttcgccatgtagtaaccagtgcgccttaccacctaataacacacaacgaggacaatattgaagtatcaccttgcgaatacgatcatataagtgaataacagtaatatatttaataattggcgcttgtattcatgaatacgtttacttgcacatcaaacatcattgatggatcaaactcaacgccacaacgagccttaacaagttcaacaaggcgttgcttattgctatgtttaactgcttgccattctttgtggaattagtgtcgtcgtataagcgacgtaattgactgactttactgaagtcacctacccactcttcacctatgtgcttattgagtagtttggctaaatcagggttacaatgtgcaagccaacgacgtgcgtaaccccattggtcttattattgaatttttctggccaaagctgataaaactcattgaataagcccgctttaagtagctcggtatgaagtgcagcaacgcatttactgagtaactaccaacaattgctaaatacgccatgcggatttgtggctctgggccttcttcaataagcgataatgctcgttgtttttcaacatctccaggccatgcttgagcaacatctgctaagaagcgggcattgatttcatagattatttctaagatacgcggtaataatcgcgcaaataatgatactgaccacttctctaatgcttctggcagtaaagtgtggttagtataagccatggttttagtagtaatagaccaggcttcttgccaatctagctcatactcatcaaccaaaatacgcatcagttctgctacagcaatacttgggtgtgtatcgtttaattgaaaaacatggtaatcagcaaagtcagagaaatcttcgccatgtttgctaacccacgtatctatgatgtcttgtaagctcgccgatgataagaagtattgctggcgtaaacgaagctctttaccattttcactgctatcatttggataaagtaccatggtgatttgttcagcaaggtttttacgagcaacagcttctgaataactccctgcgttgaattcgctcaaatcaaattcgtcagtcgcctctgatttccataaacgtagcgtgtttacgatatcgtttttatagcctggaattggcacatcataaggcacagctaagacatcgtgagaatcaagccattgacggtgctcacgtccgtatttatcagtataactttcaacatgaccaaagaattttacacgctttgattgctctggggcacttagctcccaaggatgaccttcgcgtaaccagttatcgggctgttcaatttgatggccattttcaatcgcttgattaaacatgccatattaacgaataccataaccaatcacaggtagtgccaagcttgcacaactatccaaaaacacgcagctagacggcccaaaccaccgttacctaaacctgcgtcgtgctcagcttctgcaactgtctctaactttgtacagtaatcttgtaatgcttttgcaacttgatcgtctaaatctaggtttagaatggcattaccaagagcacgacccattaaaattcaagagataaataagcagttttacgacgcttttgtccgtgaatttgctgattagttacacggcaacgtgcaaccaatctgtcacgaatagttaatgctaaagcatgatataatataattgcgattcaccgactttgtcacgcccaagggtgtaataaaaatggcgagataaatcatcatctaaggtgctttcatcaacggtaggggcatcctgccagcccttaacaacacatacttgatcggcatttttagccatgattaggatcctctgaattggcggtaaaaacccagctgctcattgcagcaatctgttgttccttatcaacatcataagttgacataggatgtatacttgtcagtgctaaatgccacttccctttcgcaagagggggtaattgacaagtaacagactctgacccagcatttaaaatgatcaataaagcttggtttgtgtgtttatcagtcaggctataaatcaacacttggcgatcaacttgatgccaatcgtcttgttccattgcagtgcctgattcagtgaaccacgcgacgtcgtaacgtggatcattatcatgaacaaaaaaacgatgcttaaagacactaaactgctttcgtaaacgcaaaacatcatcgatgaatcgggttaatggatgattaatttgcgagtctttccatgcaagccagctagtgcgattattttggcaatacgcgttattattaccaccttgtgaatgggccatttcgcttcctagtgaaagcattggaaccccttttgaaagtaataacgtcaatagaatatttttttgttgctgcaaacgtaatgcgttaatttctttatcgtcagtaaaaccttctacaccacaattaaaggagtggttggcactgtgtccatctctatttgttcaccgttggcttcattatgtttctgttcataactcactaaatcattaagcgtgaaaccatcatggctcgtcacaaaattaatgctgttaagtggtcctctgagattatgctcaaataagtcgaacgaaccatgtaaacgctttgcaagctcacctataaccccctgctcttgtcgccaaaacgtcggatagtgtcacgatacttgtcgttccactcacgccaaggtgcaggaaaagcccctaattggtaaccgcccgggccaatatcccatggctcagcaatcagttttactttactcaaaacaggatcttggttgattgcttggaaaaacgcatgcgcttgattaaagccattaggattacgagcaagaatcgttgcaaggtcgaaacgaaaaccgtctacccccattacttcaacccaatatcgcaagctatcaagcaccagctgtaaggttcttggtgaatcaatattcacagtattaccacagccggtatcattgatataatgctgaggtttatcagccacagtgcgataatagccaaggttatctaagccgcgtaaagaaagaataggcccatcagttcctgcttcagcagtatggttatagacaacatctaaaattacttcgatatcagccttatgaagagccgcaaccatttgctgaaattcgccgatatcatcattcactagataatctttgtgcggcgtgaagaaattaagcgtgttgtaaccccaatagttttgtaggcctttagccgttaagaactgctcacttatgaatgcgtgcacagggagtaattcaagacaagtcacccctatagtgcgtaaatgctctataaaactcggatggcttaagcctaagaacttaccttgtagtgctttagggatcattgggtgtcgacatgttgcgccagtaacatggcactcataaatcaccgtttaccccaactatggttaggttttttacccgtataaggtgcaagctcgcgaactcgagacttgggcatatcaacagcgttattgacttgactcaacttacctacaggcatctgaccataatggcgctcactccaagtaaactcaccatgcaagtctcgcgcataagggtctagtagtagcttgtgattattaaagaaaagccctttttctggtgcatattcaccatctgccctgtaacatacaatgcccctgcttttaaagggctaacgtgcaatgtccaaatgccaccttcgttaaggtgcattgaaagagtcattacttctgaatgaccgctattgtcaaataaacacaatgacacatgctgagcttggggtgcatacacagcaaaattaacaccgttttcaacaatagatgcccctagaggcatcgttgaaccgatttgaagctctacactatgactcatcgttcaccttcttcaggtaaatagttgcaagcccaggtaaagacacgcttatactttgattgtaaccatgactcgcagtaggctgactaaagataagttgttctgtattaccgctaacttcaacacctgaaccaaagtattcttcattgtcagaattaaagataacttgataacgacctggcttaggaacgcctattacatagtcatgataaacttgcggtgttaagttactaattaccagaacaaaatcgtcagcatgcttggcataacggatgaaactaaacatgctttgctctgcattagaactatctaaccatgcaaagcccgctgggctagtatcttgctcatagagtgcaggagtcgtggtataaatattattcagttgtttaattgtttgttgcataccactatgactaacatgctcaagcaagtgccagtcaattgattgatcatgattccattcactacgctgagcaatttcagctcccataaataacagctttttacctggatgagcccacataaatgcgtagtatgctcgtaaattagcaaacttctgccaatcatcacctggcattttctctatcaatgagcctttaccatgcacaacttcgtcgtgacttaatggtaatgtagttctcgctataggcatacaccattgaaaacgtcatttcatgatgatggtgggcacgatataaagaatcacgctgcatataatgcaaactatcgttcatccaacccatattccatttatagccaaagcctaaaccgccatgatcgacctgccgtgtcactcccggccaagcagttgattcttcagctaccatcataatgccaggatttttaccgtaacagcgcagattaacctgctttaaacattctattgcaccaagattttcacgaccgccatactggtttgggatccattgcccttcttctcggctgtaatcgagatacaacattgatgcaaccgcatcaacacgcaaaccatcaatgccaaattcatgcaaccaatacattgcattagctatcaaaaagctgcgaacttcagcacgatcataattgtaaatataggtattccaatcagggtgaaatccctgtcttacatctgcatgctcgtataaatgcgtgccatcaaaacgatgtaaaccatgtggatcacttgggaaatgacccggcacccaatctaaataataccgagatcagcgtcatggcattgctcaataaaatatacaaaatcctcaaaactgccataacggctagttgggcaaataagcccacaggctgataaccccaagaaccatcaaatggatactcactgataggcattaattgtaaatgcgtaaaaccaagatctttagtgtacggaataaggttatcggcaagctcacgccatgttaaatagcggccctcatcatcgcgtcgctgccaagagcctgcatgcacttcgtaaatactgataggtgcatcgatactgttacgctttgcgcgatttgctaacgcttcatcagacaactgtatcttcttatttagcttttgtaagacagaagcagtacccggcgcttgttgcattttaaatgcaaacggatcggctttatcaagtacttcaccagaaggtgtactaatcgcaaacttatagcactgatgctcttttaaacctgggataaataattcccaaacgccactggctgggtgaaagcgcataaaatgacggttgcgctgccaataattaaattcgccaataactgaaacgctactcgcgttaggtgcccaaacagtaaatcgcacaccttcaacaccttgctgagttacaaagtgcgcaccaaagtgctgataagcgtgttcaagactaccttcgttaaataagtacatagcttgttcatcaagtgtacttgtaaaacgatactcatcttcttgaagatactgactgccatccccataattcacatccagttggtaatcagggattgattttgctttgacagttgcaataaataaatcgctgtcaccttgctttttggcctcaataacctgcttgccttgcaaaattgacaactggcttgccccaggtaaaaaacagcgaatctcaaagcttgatgcactaactttatggggccctaaaaaactgaaaggatctttataacaacctgaagacaatgcatcgatatgtgcttgataaaccatgggttcagcaaaaggcttttgaccaacacgactgctcatttattgattccttatcgaaattaaattggctaaaaatgcatgctgagcacgaataatttgctcagttgggcgtgaaagaacgcgccgccaatttgggtattctttatcagttccgggaatgttcaccggcaaaatttgctgatctaaatcgtcaatttgaatggtaaataatctggctggagcagctgctaacgatgaggctaataactcatacaccacagacgcttcagaatctaatgataagtgctgccctgattctcttgcgataaaattaagcatacgatgcttttcgacatttctcgcttcatgttgcgcagcgctttgtgcactatcaagcaaaccatactcttgcttaacagtaatatcgtgaccagtccaccaccctttaaatggcggtacatcatgattagcaatcatcaacaaactatgcggtgcaaagtgctctgatgctaaaaattcaccttgataatctttttcaaaatagaacaagccatttgaataaattgcacttgcttttagtgcttcgaacctcacttggtacacctagatcctcacctatcacgacacagtgattaagatgggattctattttcagtatcgccaacaaatgttcaaatgggtagtaaacataacatccatcttgctgggcgttattttcaaaacaccaccacagcctt
